(19) United States
(12) Patent Application Publication
(10) Pub. No.: US 2009/0023676 A1
(43) Pub. Date: Jan. 22, 2009

(54) RNA Interference Mediated Inhibition of MAP Kinase Gene Expression or Expression of Genes Involved in MAP Kinase Pathway Using Short Interfering Nucleic Acid (SiNA)

(75) Inventors: James McSwiggen, Bothell, WA (US); Leonid Beigelman, Brisbane, CA (US); Nassim Usman, Lafayette, CO (US); Peter Haeberli, Berthoud, CO (US); Bharat M. Chowrira, Louisville, CO (US); Barry Polisky, Boulder, CO (US)

Correspondence Address: MCDONNELL, BOEHNEN, HULBERT AND BERGHOFF, LLP, 300 SOUTH WACKER DRIVE, SUITE 3100, CHICAGO, IL, 60606, US

(73) Assignee: Sirna Therapeutics, Inc., San Francisco, CA (US)

(21) Appl. No.: 12/201,759

(22) Filed: Aug. 29, 2008

Related U.S. Application Data
(63) Continuation of application No. 10/424,339, filed on Apr. 25, 2003.
Application No. 10/424,339 is a continuation-in-part of application No. PCT/US03/02510, filed on Jan. 28, 2003.
Application No. PCT/US03/02510 is a continuation-in-part of application No. PCT/US03/05346, filed on Feb. 20, 2003.
Application No. PCT/US03/05346 is a continuation-in-part of application No. PCT/US03/05028, filed on Feb. 20, 2003.
(60) Provisional application No. 60/358,580, filed on Feb. 20, 2002.
(60) Provisional application No. 60/363,124, filed on Mar. 11, 2002.
(60) Provisional application No. 60/386,782, filed on Jun. 6, 2002.
(60) Provisional application No. 60/406,784, filed on Aug. 29, 2002.
(60) Provisional application No. 60/408,378, filed on Sep. 5, 2002.
(60) Provisional application No. 60/409,293, filed on Sep. 9, 2002.
(60) Provisional application No. 60/440,129, filed on Jan. 15, 2003.

(51) Int. Cl. A61K 31/7088; C07H 21/02

(52) U.S. Cl. 514/44; 536/24.5

(57) ABSTRACT

The present invention concerns methods and reagents useful in modulating MAP kinase gene expression in a variety of applications, including use in therapeutic, diagnostic, target validation, and genomic discovery applications. Specifically, the invention relates to small nucleic acid molecules, such as short interfering nucleic acid (siNA), short interfering RNA (siRNA), double-stranded RNA (dsRNA), micro-RNA (miRNA), and short hairpin RNA (shRNA) molecules capable of mediating RNA interference (RNAi) against c-JUN, JNK, p38, and ERK gene expression, useful in the treatment of cancer, inflammation, obesity and insulin resistance (e.g. Type I and Type II diabetes).

[0001] This application is a continuation of U.S. patent application Ser. No. 10/424,339, filed Apr. 25, 2003, which is a continuation-in-part of International Patent Application No. PCT/US03/02510, filed Jan. 28, 2003, and is a continuation-in-part of International Patent Application No. PCT/US03/05346, filed Feb. 20, 2003, and is a continuation-in-part of International Patent Application No. PCT/US03/05028, filed Feb. 20, 2003, which each claim the benefit of U.S. Provisional Application No. 60/358,580 filed Feb. 20, 2002, U.S. Provisional Application No. 60/363,124 filed Mar. 11, 2002, U.S. Provisional Application No. 60/386,782 filed Jun. 6, 2002, U.S. Provisional Application No. 60/406,784 filed Aug. 29, 2002, U.S. Provisional Application No. 60/408,378 filed Sep. 5, 2002, U.S. Provisional Application No. 60/409,293 filed Sep. 9, 2002, and U.S. Provisional Application No. 60/440,129 filed Jan. 15, 2003. The instant application claims the benefit of all the listed applications, which are hereby incorporated by reference herein in their entireties, including the drawings.

### SEQUENCE LISTING

[0002] The sequence listing submitted via EFS, in compliance with 37 CFR § 1.52(e)(5), is incorporated herein by reference. The sequence listing text file submitted via EFS contains the file “SequenceListing45USCNT”, created on Aug. 27, 2008, which is 468,031 bytes in size.

### FIELD OF THE INVENTION

[0003] The present invention concerns compounds, compositions, and methods for the study, diagnosis, and treatment of conditions and diseases that respond to the modulation of mitogen activated protein kinase (MAP kinase) gene expression and/or activity. The present invention also concerns compounds, compositions, methods relating to the modulation of expression or activity of genes involved in the MAP kinase pathway. Specifically, the invention relates to small nucleic acid molecules, such as short interfering nucleic acid (siNA), short interfering RNA (siRNA), double-stranded RNA (dsRNA), micro-RNA (miRNA), and short hairpin RNA (shRNA) molecules capable of mediating RNA interference (RNAi) against genes involved in the Jun amino-terminal kinase (JNK), p38, and/or ERK pathway, such as c-JUN. More specifically, the invention relates to small nucleic acid molecules, such as short interfering nucleic acid (siNA), short interfering RNA (siRNA), double-stranded RNA (dsRNA), micro-RNA (miRNA), and short hairpin RNA (shRNA) molecules capable of mediating RNA interference (RNAi) against Jun amino-terminal kinase (JNK), p38, ERK, and/or c-JUN genes.

### BACKGROUND OF THE INVENTION

[0004] The following is a discussion of relevant art pertaining to RNAi. The discussion is provided only for understanding of the invention that follows. The summary is not an admission that any of the work described below is prior art to the claimed invention.

[0005] RNA interference refers to the process of sequence-specific post-transcriptional gene silencing in animals mediated by short interfering RNAs (siRNAs) (Fire et al., 1998, Nature, 391, 806). The corresponding process in plants is commonly referred to as post-transcriptional gene silencing or RNA silencing and is also referred to as quelling in fungi. The process of post-transcriptional gene silencing is thought to be an evolutionarily-conserved cellular defense mechanism used to prevent the expression of foreign genes and is commonly shared by diverse flora and phyla (Fire et al., 1999, Trends Genet., 15, 358). Such protection from foreign gene expression may have evolved in response to the production of double-stranded RNAs (dsRNAs) derived from viral infection or from the random integration of transposon elements into a host genome via a cellular response that specifically destroys homologous single-stranded RNA or viral genomic RNA. The presence of dsRNA in cells triggers the RNAi response though a mechanism that has yet to be fully characterized. This mechanism appears to be different from the interferon response that results from dsRNA-mediated activation of protein kinase PKR and 2′,5′-oligoadenylate synthetase resulting in non-specific cleavage of mRNA by ribonuclease L.

[0006] The presence of long dsRNAs in cells stimulates the activity of a ribonuclease III enzyme referred to as dicer. Dicer is involved in the processing of the dsRNA into short pieces of dsRNA known as short interfering RNAs (siRNAs) (Berstein et al., 2001, Nature, 409, 363). Short interfering RNAs derived from dicer activity are typically about 21 to about 23 nucleotides in length and comprise about 19 base pair duplexes (Elbashir et al., 2001, Genes Dev., 15, 188). Dicer has also been implicated in the excision of 21- and 22-nucleotide small temporal RNAs (stRNAs) from precursor RNA of conserved structure that are implicated in translational control (Hutvagner et al., 2001, Science, 293, 834). The RNAi response also features an endonuclease complex, commonly referred to as an RNA-induced silencing complex (RISC), which mediates cleavage of single-stranded RNA having sequence complementary to the antisense strand of the siRNA duplex. Cleavage of the target RNA takes place in the middle of the region complementary to the antisense strand of the siRNA duplex (Elbashir et al., 2001, Genes Dev., 15, 188).

[0007] RNAi has been studied in a variety of systems. Fire et al., 1998, Nature, 391, 806, were the first to observe RNAi in C. elegans. Wianny and Goetz, 1999, Nature Cell Biol., 2, 70, describe RNAi mediated by dsRNA in mouse embryos. Hammond et al., 2000, Nature, 404, 293, describe RNAi in Drosophila cells transfected with dsRNA. Elbashir et al., 2001, Nature, 411, 494, describe RNAi induced by introduction of duplexes of synthetic 21-nucleotide RNAs in cultured mammalian cells including human embryonic kidney and HeLa cells. Recent work in Drosophila embryonic lysates (Elbashir et al., 2001, EMBO J., 20, 6877) has revealed certain requirements for siRNA length, structure, chemical composition, and sequence that are essential to mediate efficient RNAi activity. These studies have shown that 21-nucleotide siRNA duplexes are most active when containing 3′-terminal dinucleotide overhangs. Furthermore, complete substitution of one or both siRNA strands with 2′-deoxy (2′-H) or 2′-O-methyl nucleotides abolishes RNAi activity, whereas substitution of the 3′-terminal siRNA overhang nucleotides with 2′-deoxy nucleotides (2′-H) was shown to be tolerated. Single mismatch sequences in the center of the siRNA duplex were also shown to abolish RNAi activity. In addition, these studies also indicate that the position of the cleavage site in the target RNA is defined by the 5′-end of the siRNA guide sequence rather than the 3′-end of the guide sequence (Elbashir et al., 2001, EMBO J., 20, 6877). Other studies have indicated that a 5′-phosphate on the target-complementary strand of a siRNA duplex is required for siRNA activity and that ATP is utilized to maintain the 5′-phosphate moiety on the siRNA (Nykanen et al., 2001, Cell, 107, 309).

[0008] Studies have shown that replacing the 3′-terminal nucleotide overhanging segments of a 21-mer siRNA duplex having two-nucleotide 3′-overhangs with deoxyribonucleotides does not have an adverse effect on RNAi activity. Replacing up to four nucleotides on each end of the siRNA with deoxyribonucleotides has been reported to be well tolerated, whereas complete substitution with deoxyribonucleotides results in no RNAi activity (Elbashir et al., 2001, EMBO J., 20, 6877). In addition, Elbashir et al., supra, also report that substitution of siRNA with 2′-O-methyl nucleotides completely abolishes RNAi activity. Li et al., International PCT Publication No. WO 00/44914, and Beach et al., International PCT Publication No. WO 01/68836 preliminarily suggest that siRNA may include modifications to either the phosphate-sugar backbone or the nucleoside to include at least one of a nitrogen or sulfur heteroatom, however, neither application postulates to what extent such modifications would be tolerated in siRNA molecules, nor provides any further guidance or examples of such modified siRNA. Kreutzer et al., Canadian Patent Application No. 2,359,180, also describe certain chemical modifications for use in dsRNA constructs in order to counteract activation of double-stranded RNA-dependent protein kinase PKR, specifically 2′-amino or 2′-methyl nucleotides, and nucleotides containing a 2′-O or 4′-C methylene bridge. However, Kreutzer et al. similarly fails to provide examples or guidance as to what extent these modifications would be tolerated in siRNA molecules.

[0009] Parrish et al., 2000, Molecular Cell, 6, 1977-1087, tested certain chemical modifications targeting the unc-22 gene in C. elegans using long (>25 nt) siRNA transcripts. The authors describe the introduction of thiophosphate residues into these siRNA transcripts by incorporating thiophosphate nucleotide analogs with T7 and T3 RNA polymerase and observed that RNAs with two phosphorothioate modified bases also had substantial decreases in effectiveness as RNAi. Further, Parrish et al. reported that phosphorothioate modification of more than two residues greatly destabilized the RNAs in vitro such that interference activities could not be assayed. Id. at 1081. The authors also tested certain modifications at the 2′-position of the nucleotide sugar in the long siRNA transcripts and found that substituting deoxynucleotides for ribonucleotides produced a substantial decrease in interference activity, especially in the case of Uridine to Thymidine and/or Cytidine to deoxy-Cytidine substitutions. Id. In addition, the authors tested certain base modifications, including substituting, in sense and antisense strands of the siRNA, 4-thiouracil, 5-bromouracil, 5-iodouracil, and 3-(aminoallyl)uracil for uracil, and inosine for guanosine. Whereas 4-thiouracil and 5-bromouracil substitution appeared to be tolerated, Parrish reported that inosine produced a substantial decrease in interference activity when incorporated in either strand. Parrish also reported that incorporation of 5-iodouracil and 3-(aminoallyl)uracil in the antisense strand resulted in a substantial decrease in RNAi activity as well.

[0010] The use of longer dsRNA has been described. For example, Beach et al., International PCT Publication No. WO 01/68836, describes specific methods for attenuating gene expression using endogenously-derived dsRNA. Tuschl et al., International PCT Publication No. WO 01/75164, describe a Drosophila in vitro RNAi system and the use of specific siRNA molecules for certain functional genomic and certain therapeutic applications; although Tuschl, 2001, Chem. Biochem., 2, 239-245, doubts that RNAi can be used to cure genetic diseases or viral infection due to the danger of activating interferon response. Li et al., International PCT Publication No. WO 00/44914, describe the use of specific dsRNAs for attenuating the expression of certain target genes. Zernicka-Goetz et al., International PCT Publication No. WO 01/36646, describe certain methods for inhibiting the expression of particular genes in mammalian cells using certain dsRNA molecules. Fire et al., International PCT Publication No. WO 99/32619, describe particular methods for introducing certain dsRNA molecules into cells for use in inhibiting gene expression. Plaetinck et al., International PCT Publication No. WO 00/01846, describe certain methods for identifying specific genes responsible for conferring a particular phenotype in a cell using specific dsRNA molecules. Mello et al., International PCT Publication No. WO 01/29058, describe the identification of specific genes involved in dsRNA-mediated RNAi. Deschamps Depaillette et al., International PCT Publication No. WO 99/07409, describe specific compositions consisting of particular dsRNA molecules combined with certain anti-viral agents. Waterhouse et al., International PCT Publication No. 99/53050, describe certain methods for decreasing the phenotypic expression of a nucleic acid in plant cells using certain dsRNAs. Driscoll et al., International PCT Publication No. WO 01/49844, describe specific DNA constructs for use in facilitating gene silencing in targeted organisms.

[0011] Others have reported on various RNAi and gene-silencing systems. For example, Parrish et al., 2000, Molecular Cell, 6, 1977-1087, describe specific chemically-modified siRNA constructs targeting the unc-22 gene of C. elegans. Grossniklaus, International PCT Publication No. WO 01/38551, describes certain methods for regulating polycomb gene expression in plants using certain dsRNAs. Churikov et al., International PCT Publication No. WO 01/42443, describe certain methods for modifying genetic characteristics of an organism using certain dsRNAs. Cogoni et al., International PCT Publication No. WO 01/53475, describe certain methods for isolating a Neurospora silencing gene and uses thereof. Reed et al., International PCT Publication No. WO 01/68836, describe certain methods for gene silencing in plants. Honer et al., International PCT Publication No. WO 01/70944, describe certain methods of drug screening using transgenic nematodes as Parkinson's Disease models using certain dsRNAs. Deak et al., International PCT Publication No. WO 01/72774, describe certain Drosophila-derived gene products that may be related to RNAi in Drosophila. Arndt et al., International PCT Publication No. WO 01/92513 describe certain methods for mediating gene suppression by using factors that enhance RNAi. Tuschl et al., International PCT Publication No. WO 02/44321, describe certain synthetic siRNA constructs. Pachuk et al., International PCT Publication No. WO 00/63364, and Satishchandran et al., International PCT Publication No. WO 01/04313, describe certain methods and compositions for inhibiting the function of certain polynucleotide sequences using certain dsRNAs. Echeverri et al., International PCT Publication No. WO 02/38805, describe certain C. elegans genes identified via RNAi. Kreutzer et al., International PCT Publications Nos. WO 02/055692, WO 02/055693, and EP 1144623 B1 describes certain methods for inhibiting gene expression using RNAi. Graham et al., International PCT Publications Nos. WO 99/49029 and WO 01/70949, and AU 4037501 describe certain vector expressed siRNA molecules. Fire et al., U.S. Pat. No. 6,506,559, describe certain methods for inhibiting gene expression in vitro using certain long dsRNA (greater than 25 nucleotide) constructs that mediate RNAi.

### SUMMARY OF THE INVENTION

[0012] This invention relates to compounds, compositions, and methods useful for modulating the expression of genes associated with mitogen activated protein kinase (MAP kinase) gene expression pathways (see for example FIG. 12) by RNA interference (RNAi) using short interfering nucleic acid (siNA) molecules. In particular, the instant invention features small nucleic acid molecules, such as short interfering nucleic acid (siNA), short interfering RNA (siRNA), double-stranded RNA (dsRNA), micro-RNA (miRNA), and short hairpin RNA (shRNA) molecules and methods used to modulate the expression of MAP kinase genes, including c-JUN, JNK genes such as JNK1 and JNK2, ERK genes such as ERK1 and ERK2, and p38 genes. A siNA of the invention can be unmodified or chemically-modified. A siNA of the instant invention can be chemically synthesized, expressed from a vector or enzymatically synthesized. The instant invention also features various chemically-modified synthetic short interfering nucleic acid (siNA) molecules capable of modulating telomerase gene expression or activity in cells by RNA interference (RNAi). The use of chemically-modified siNA improves various properties of native siNA molecules through increased resistance to nuclease degradation in vivo and/or through improved cellular uptake. Further, contrary to earlier published studies, siNA having multiple chemical modifications retains its RNAi activity. The siNA molecules of the instant invention provide useful reagents and methods for a variety of therapeutic, diagnostic, target validation, genomic discovery, genetic engineering, and pharmacogenomic applications.

[0013] In one embodiment, the invention features one or more siNA molecules and methods that independently or in combination modulate the expression of gene(s) encoding MAP kinase proteins, such as genes encoding sequences comprising those sequences referred to by GenBank Accession Nos. shown in Table I, referred to herein generally as MAP kinases. The description below of the various aspects and embodiments of the invention is provided with reference to exemplary MAP kinases such as JNK1 (also referred to as MAPK8, for example Genbank Accession No. NM_{—}002750), p38 (also referred to as MAPK14, for example Genbank Accession No. NM_{—}139012), ERK2 (also referred to as MAPK1, for example Genbank Accession No. NM_{—}002745), and ERK1 (also referred to as MAPK3, for example Genbank Accession XM_{—}055766) genes. However, the various aspects and embodiments are also directed to other MAP kinases referred to by Accession number in Table 1 and other genes involved in MAP kinase pathways such those genes encoding c-JUN (for example Genbank Accession No. NM_{—}002228), TNF-alpha (for example Genbank Accession No. M10988), interleukins such as IL-8 (for example Genbank Accession No. M68932), and activating proteins such as AP-1 (for example Genbank Accession No. NM_{—}013277). The various aspects and embodiments are also directed to other genes that are involved in the MAP kinase pathways of gene expression. Those additional genes can be analyzed for target sites using the methods described for MAP kinase genes herein. Thus, the inhibition and the effects of such inhibition of the other genes can be performed as described herein.

[0014] In one embodiment, the invention features a siNA molecule that down-regulates expression of a MAP kinase gene, for example, wherein the MAP kinase gene comprises MAP kinase encoding sequence (e.g., c-JUN, JNK1, JNK2, p38, ERK1, or ERK2).

[0015] In one embodiment, the invention features a siNA molecule having RNAi activity against MAP kinase RNA, wherein the siNA molecule comprises a sequence complementary to an RNA having MAP kinase encoding sequence, such as those sequences having MAP kinase GenBank Accession Nos. shown in Table I. In another embodiment, the invention features a siNA molecule having RNAi activity against MAP kinase RNA, wherein the siNA molecule comprises a sequence complementary to an RNA having other MAP kinase encoding sequence, such as mutant MAP kinase genes, splice variants of MAP kinase genes, and other MAP kinase ligands and receptors. Chemical modifications as shown in Tables III and IV or otherwise described herein can be applied to any siNA construct of the invention.

[0016] In another embodiment, the invention features a siNA molecule having RNAi activity against a MAP kinase gene, wherein the siNA molecule comprises nucleotide sequence complementary to nucleotide sequence of a MAP kinase gene, such as those MAP kinase sequences having GenBank Accession Nos. shown in Table I or other MAP kinase encoding sequence, such as mutant MAP kinase genes, splice variants of MAP kinase genes, and other MAP kinase ligands and receptors. In another embodiment, a siNA molecule of the invention includes nucleotide sequence that can interact with nucleotide sequence of a MAP kinase gene and thereby mediate silencing of MAP kinase gene expression, for example, wherein the siNA mediates regulation of MAP kinase gene expression by cellular processes that modulate the chromatin structure of the MAP kinase gene and prevent transcription of the MAP kinase gene.

[0017] In another embodiment, the invention features a siNA molecule comprising nucleotide sequence, for example, nucleotide sequence in the antisense region of the siNA molecule, that is complementary to a nucleotide sequence or portion of sequence of a MAP kinase gene. In another embodiment, the invention features a siNA molecule comprising a region, for example, the antisense region of the siNA construct, complementary to a sequence comprising a MAP kinase gene sequence or a portion thereof.

[0018] In one embodiment, the antisense region of ERK2 siNA constructs can comprise a sequence complementary to sequence having any of SEQ ID NOs. 1-163, or 1113-1116. The antisense region can also comprise sequence having any of SEQ ID NOs. 164-326, 1133-1136, 1141-1144, or 1149-1152. In another embodiment, the sense region of ERK2 siNA constructs can comprise sequence having any of SEQ ID NOs. 1-163, 1113-1116, 1129-1132, 1137-1140, or 1145-1148.

[0019] In one embodiment, the antisense region of ERK1 siNA constructs can comprise a sequence complementary to sequence having any of SEQ ID NOs. 327-431, or 1117-1120. The antisense region can also comprise sequence having any of SEQ ID NOs. 432-536, 1157-1160, 1165-1168, or 1173-1176. In another embodiment, the sense region of ERK1 siNA constructs can comprise sequence having any of SEQ ID NOs. 327-431, 1117-1120, 1153-1156, 1161-1164, or 1169-1172.

[0020] In one embodiment, the antisense region of JNK1 siNA constructs can comprise a sequence complementary to sequence having any of SEQ ID NOs. 537-615 or 1121-1124. The antisense region can also comprise sequence having any of SEQ ID NOs. 616-694, 1181-1184, 1189-1192, 1197-1200, 1237, 1239, 1241, 1243, 1245, or 1246. In another embodiment, the sense region of JNK1 constructs can comprise sequence having any of SEQ ID NOs. 537-615, 1121-1124, 1177-1180, 1185-1188, 1193-1196, 1236, 1238, 1240, 1242, or 1244. The sense region can comprise a sequence of SEQ ID NO. 1225 and the antisense region can comprise a sequence of SEQ ID NO. 1226. The sense region can comprise a sequence of SEQ ID NO. 1227 and the antisense region can comprise a sequence of SEQ ID NO. 1228. The sense region can comprise a sequence of SEQ ID NO. 1229 and the antisense region can comprise a sequence of SEQ ID NO. 1230. The sense region can comprise a sequence of SEQ ID NO. 1231 and the antisense region can comprise a sequence of SEQ ID NO. 1232. The sense region can comprise a sequence of SEQ ID NO. 1233 and the antisense region can comprise a sequence of SEQ ID NO. 1234. The sense region can comprise a sequence of SEQ ID NO. 1231 and the antisense region can comprise a sequence of SEQ ID NO. 1235.

[0021] In one embodiment, the antisense region of p38 siNA constructs can comprise a sequence complementary to sequence having any of SEQ ID NOs. 695-903 or 1125-1128. The antisense region can also comprise sequence having any of SEQ ID NOs. 904-1112, 1205-1208, 1213-1216, or 1221-1224. In another embodiment, the sense region of p38 siNA constructs can comprise sequence having any of SEQ ID NOs. 695-903, 1125-1128, 1201-1204, 1209-1212, or 1217-1220.

[0022] In one embodiment, the antisense region of c-JUN siNA constructs can comprise a sequence complementary to sequence having any of SEQ ID NOs. 1247-1427 or 1609-1616. In one embodiment, the antisense region of c-JUN siNA constructs can comprise sequence having any of SEQ ID NOs. 1428-1608, 1625-1632, 1641-1648, 1657-1664, 1673-1680, 1698, 1700, 1702, 1705, 1707, 1709, 1711, or 1714. In another embodiment, the sense region of c-JUN siNA constructs can comprise sequence having any of SEQ ID NOs. 1247-1427, 1609-1616, 1617-1624, 1633-1640, 1649-1656, 1665-1672, 1697, 1699, 1701, 1703, 1704, 1706, 1708, 1710, 1712, or 1713.

[0023] In one embodiment, a siNA molecule of the invention comprises any of SEQ ID NOs. 1-1714. The sequences shown in SEQ ID NOs: 1-1714 are not limiting. A siNA molecule of the invention can comprise any contiguous MAP kinase sequence (e.g., about 19 to about 25, or about 19, 20, 21, 22, 23, 24 or 25 contiguous MAP kinase nucleotides).

[0024] In yet another embodiment, the invention features a siNA molecule comprising a sequence, for example, the antisense sequence of the siNA construct, complementary to a sequence or portion of sequence comprising sequence represented by GenBank Accession Nos. shown in Table I. Chemical modifications in Tables III and IV and described herein can be applied to any siRNA construct of the invention.

[0025] In one embodiment of the invention a siNA molecule comprises an antisense strand having about 19 to about 29 nucleotides, wherein the antisense strand is complementary to a RNA sequence encoding a MAP kinase protein, and wherein said siNA further comprises a sense strand having about 19 to about 29 (e.g., about 19, 20, 21, 22, 23, 24, 25, 26, 27, 28 or 29) nucleotides, and wherein said sense strand and said antisense strand are distinct nucleotide sequences with at least about 19 complementary nucleotides.

[0026] In another embodiment of the invention a siNA molecule of the invention comprises an antisense region having about 19 to about 29 (e.g., about 19, 20, 21, 22, 23, 24, 25, 26, 27, 28 or 29) nucleotides, wherein the antisense region is complementary to a RNA sequence encoding a MAP kinase protein, and wherein said siNA further comprises a sense region having about 19 to about 29 nucleotides, wherein said sense region and said antisense region comprise a linear molecule with at least about 19 complementary nucleotides.

[0027] In one embodiment of the invention a siNA molecule comprises an antisense strand comprising a nucleotide sequence that is complementary to a nucleotide sequence encoding a MAP kinase protein or a portion thereof. The siNA further comprises a sense strand, wherein said sense strand comprises a nucleotide sequence of a MAP kinase gene or a portion thereof.

[0028] In another embodiment, a siNA molecule comprises an antisense region comprising a nucleotide sequence that is complementary to a nucleotide sequence encoding a MAP kinase protein or a portion thereof. The siNA molecule further comprises a sense region, wherein said sense region comprises a nucleotide sequence of a MAP kinase gene or a portion thereof.

[0029] In one embodiment, a siNA molecule of the invention has RNAi activity that modulates expression of RNA encoded by a MAP kinase gene. Because MAP kinase genes can share some degree of sequence homology with each other, siNA molecules can be designed to target a class of MAP kinase genes (and associated receptor or ligand genes) or alternately specific MAP kinase genes by selecting sequences that are either shared amongst different MAP kinase targets or alternatively that are unique for a specific MAP kinase target. Therefore, in one embodiment, the siNA molecule can be designed to target conserved regions of MAP kinase RNA sequence having homology between several MAP kinase genes so as to target several MAP kinase genes (e.g., different MAP kinase isoforms, splice variants, mutant genes etc.) with one siNA molecule. In another embodiment, the siNA molecule can be designed to target a sequence that is unique to a specific MAP kinase RNA sequence due to the high degree of specificity that the siNA molecule requires to mediate RNAi activity.

[0030] In one embodiment, nucleic acid molecules of the invention that act as mediators of the RNA interference gene silencing response are double-stranded nucleic acid molecules. In another embodiment, the siNA molecules of the invention consist of duplexes containing about 19 base pairs between oligonucleotides comprising about 19 to about 25 (e.g., about 19, 20, 21, 22, 23, 24 or 25) nucleotides. In yet another embodiment, siNA molecules of the invention comprise duplexes with overhanging ends of about 1 to about 3 (e.g., about 1, 2, or 3) nucleotides, for example, about 21-nucleotide duplexes with about 19 base pairs and 3′-terminal mononucleotide, dinucleotide, or trinucleotide overhangs.

[0031] In one embodiment, the invention features one or more chemically-modified siNA constructs having specificity for MAP kinase expressing nucleic acid molecules, such as RNA encoding a MAP kinase protein. Non-limiting examples of such chemical modifications include without limitation phosphorothioate internucleotide linkages, 2′-deoxyribonucleotides, 2′-O-methyl ribonucleotides, 2′-deoxy-2′-fluoro ribonucleotides, “universal base” nucleotides, “acyclic” nucleotides, 5-C-methyl nucleotides, and terminal glyceryl and/or inverted deoxy abasic residue incorporation. These chemical modifications, when used in various siNA constructs, are shown to preserve RNAi activity in cells while at the same time, dramatically increasing the serum stability of these compounds. Furthermore, contrary to the data published by Parrish et al., supra, applicant demonstrates that multiple (greater than one) phosphorothioate substitutions are well-tolerated and confer substantial increases in serum stability for modified siNA constructs.

[0032] In one embodiment, a siNA molecule of the invention comprises modified nucleotides while maintaining the ability to mediate RNAi. The modified nucleotides can be used to improve in vitro or in vivo characteristics such as stability, activity, and/or bioavailability. For example, a siNA molecule of the invention can comprise modified nucleotides as a percentage of the total number of nucleotides present in the siNA molecule. As such, a siNA molecule of the invention can generally comprise about 5% to about 100% modified nucleotides (e.g., 5%, 10%, 15%, 20%, 25%, 30%, 35%, 40%, 45%, 50%, 55%, 60%, 65%, 70%, 75%, 80%, 85%, 90%, 95% or 100% modified nucleotides). The actual percentage of modified nucleotides present in a given siNA molecule will depend on the total number of nucleotides present in the siNA. If the siNA molecule is single stranded, the percent modification can be based upon the total number of nucleotides present in the single stranded siNA molecules. Likewise, if the siNA molecule is double stranded, the percent modification can be based upon the total number of nucleotides present in the sense strand, antisense strand, or both the sense and antisense strands.

[0033] In one embodiment, the invention features a double-stranded short interfering nucleic acid (siNA) molecule that down-regulates expression of a MAP kinase gene, wherein the siNA molecule comprises one or more chemical modifications and each strand of the double-stranded siNA is about 21 nucleotides long.

[0034] In one embodiment, a siNA molecule of the invention does not contain any ribonucleotides. In another embodiment, a siNA molecule of the invention comprises one or more ribonucleotides.

[0035] In one embodiment, the invention features a double-stranded short interfering nucleic acid (siNA) molecule that down-regulates expression of a MAP kinase gene, wherein one of the strands of the double-stranded siNA molecule comprises a nucleotide sequence that is complementary to a nucleotide sequence of the MAP kinase gene or a portion thereof, and wherein the second strand of the double-stranded siNA molecule comprises a nucleotide sequence substantially similar to the nucleotide sequence of the MAP kinase gene or a portion thereof.

[0036] In one embodiment, the invention features a double-stranded short interfering nucleic acid (siNA) molecule that down-regulates expression of a MAP kinase gene, wherein each strand of the siNA molecule comprises about 19 to about 23 nucleotides, and wherein each strand comprises at least about 19 nucleotides that are complementary to the nucleotides of the other strand.

[0037] In one embodiment, the invention features a double-stranded short interfering nucleic acid (siNA) molecule that down-regulates expression of a MAP kinase gene, wherein the siNA molecule comprises an antisense region comprising a nucleotide sequence that is complementary to a nucleotide sequence of the MAP kinase gene or a portion thereof, and wherein the siNA further comprises a sense region, wherein the sense region comprises a nucleotide sequence substantially similar to the nucleotide sequence of the MAP kinase gene or a portion thereof.

[0038] In one embodiment, the invention features a double-stranded short interfering nucleic acid (siNA) molecule that down-regulates expression of a MAP kinase gene, wherein the antisense region and the sense region each comprise about 19 to about 23 nucleotides, and wherein the antisense region comprises at least about 19 nucleotides that are complementary to nucleotides of the sense region.

[0039] In one embodiment, the invention features a double-stranded short interfering nucleic acid (siNA) molecule that down-regulates expression of a MAP kinase gene, wherein the siNA molecule comprises a sense region and an antisense region and wherein the antisense region comprises a nucleotide sequence that is complementary to a nucleotide sequence of RNA encoded by the MAP kinase gene or a portion thereof and the sense region comprises a nucleotide sequence that is complementary to the antisense region.

[0040] In one embodiment, the invention features a double-stranded short interfering nucleic acid (siNA) molecule that down-regulates expression of a MAP kinase gene, wherein the siNA molecule is assembled from two separate oligonucleotide fragments wherein one fragment comprises the sense region and the second fragment comprises the antisense region of the siNA molecule. The sense region can be connected to the antisense region via a linker molecule, such as a polynucleotide linker or a non-nucleotide linker.

[0041] In one embodiment, the invention features a double-stranded short interfering nucleic acid (siNA) molecule that down-regulates expression of a MAP kinase gene, wherein the siNA molecule comprises a sense region and an antisense region and wherein the antisense region comprises a nucleotide sequence that is complementary to a nucleotide sequence of RNA encoded by the MAP kinase gene or a portion thereof and the sense region comprises a nucleotide sequence that is complementary to the antisense region, wherein the siNA molecule has one or more modified pyrimidine and/or purine nucleotides. In one embodiment, the pyrimidine nucleotides in the sense region are 2′-O-methylpyrimidine nucleotides, or 2′-deoxy-2′-fluoro pyrimidine nucleotides and the purine nucleotides present in the sense region are 2′-deoxy purine nucleotides. In another embodiment, the pyrimidine nucleotides in the sense region are 2′-deoxy-2′-fluoro pyrimidine nucleotides and the purine nucleotides present in the sense region are 2′-O-methyl purine nucleotides. In another embodiment of any of the above described siNA molecules, any nucleotides present in a non-complementary region of the sense strand (e.g. overhang region) are 2′-deoxy nucleotides.

[0042] In one embodiment, the invention features a double-stranded short interfering nucleic acid (siNA) molecule that down-regulates expression of a MAP kinase gene, wherein the siNA molecule is assembled from two separate oligonucleotide fragments wherein one fragment comprises the sense region and the second fragment comprises the antisense region of the siNA molecule, and wherein the fragment comprising the sense region includes a terminal cap moiety at the 5′-end, the 3′-end, or both of the 5′ and 3′ ends of the fragment comprising the sense region. In one embodiment, the terminal cap moiety is an inverted deoxy abasic moiety or glyceryl moiety. In one embodiment, each of the two fragments of the siNA molecule comprises about 21 nucleotides.

[0043] In one embodiment, the invention features a double-stranded short interfering nucleic acid (siNA) molecule that down-regulates expression of a MAP kinase gene, wherein the siNA molecule comprises a sense region and an antisense region and wherein the antisense region comprises a nucleotide sequence that is complementary to a nucleotide sequence or a portion thereof of RNA encoded by the MAP kinase gene and the sense region comprises a nucleotide sequence that is complementary to the antisense region, and wherein the purine nucleotides present in the antisense region comprise 2′-deoxy-purine nucleotides. In another embodiment, the purine nucleotides present in the antisense region comprise 2′-O-methyl purine nucleotides. In either of the above embodiments, the antisense region comprises a phosphorothioate internucleotide linkage at the 3′ end of the antisense region. In an alternative embodiment, the antisense region comprises a glyceryl modification at the 3′ end of the antisense region. In another embodiment of any of the above described siNA molecules, any nucleotides present in a non-complementary region of the antisense strand (e.g. overhang region) are 2′-deoxy nucleotides.

[0044] In one embodiment, the invention features a double-stranded short interfering nucleic acid (siNA) molecule that down-regulates expression of a MAP kinase gene, wherein the siNA molecule is assembled from two separate oligonucleotide fragments each comprising 21 nucleotides, wherein one fragment comprises the sense region and the second fragment comprises the antisense region of the siNA molecule, and wherein about 19 nucleotides of each fragment of the siNA molecule are base-paired to the complementary nucleotides of the other fragment of the siNA molecule and wherein at least two 3′ terminal nucleotides of each fragment of the siNA molecule are not base-paired to the nucleotides of the other fragment of the siNA molecule. In one embodiment, each of the two 3′ terminal nucleotides of each fragment of the siNA molecule is a 2′-deoxy-pyrimidine, such as 2′-deoxy-thymidine. In another embodiment, all 21 nucleotides of each fragment of the siNA molecule are base-paired to the complementary nucleotides of the other fragment of the siNA molecule. In another embodiment, about 19 nucleotides of the antisense region are base-paired to the nucleotide sequence or a portion thereof of the RNA encoded by the MAP kinase gene. In another embodiment, 21 nucleotides of the antisense region are base-paired to the nucleotide sequence or a portion thereof of the RNA encoded by the MAP kinase gene. In any of the above embodiments, the 5′-end of the fragment comprising said antisense region can optionally include a phosphate group.

[0045] In one embodiment, the invention features a double-stranded short interfering nucleic acid (siNA) molecule that inhibits the expression of a MAP kinase RNA sequence (e.g., wherein said target RNA sequence is encoded by a MAP kinase gene or a gene involved in the MAP kinase pathway), wherein the siNA molecule does not contain any ribonucleotides and wherein each strand of the double-stranded siNA molecule is about 21 nucleotides long.

[0046] In one embodiment, the invention features a medicament comprising a siNA molecule of the invention.

[0047] In one embodiment, the invention features an active ingredient comprising a siNA molecule of the invention.

[0048] In one embodiment, the invention features the use of a double-stranded short interfering nucleic acid (siNA) molecule to down-regulate expression of a MAP kinase gene, wherein the siNA molecule comprises one or more chemical modifications and each strand of the double-stranded siNA is about 21 nucleotides long.

[0049] The invention features a double-stranded short interfering nucleic acid (siNA) molecule that inhibits expression of a MAP kinase gene, wherein one of the strands of the double-stranded siNA molecule is an antisense strand which comprises nucleotide sequence that is complementary to nucleotide sequence of a MAP kinase RNA or a portion thereof, the other strand is a sense strand which comprises nucleotide sequence that is complementary to a nucleotide sequence of the antisense strand and wherein a majority of the pyrimidine nucleotides present in the double-stranded siNA molecule comprises a sugar modification. In one embodiment, the nucleotide sequence of the antisense strand of the double-stranded siNA molecule is complementary to the nucleotide sequence of the MAP kinase RNA which encodes a protein or a portion thereof. In one embodiment, each strand of the siNA molecule comprises about 19 to about 29 nucleotides, and each strand comprises at least about 19 nucleotides that are complementary to the nucleotides of the other strand. In one embodiment, the siNA molecule is assembled from two oligonucleotide fragments, wherein one fragment comprises the nucleotide sequence of the antisense strand of the siNA molecule and a second fragment comprises nucleotide sequence of the sense region of the siNA molecule. In another embodiment, the sense strand is connected to the antisense strand via a linker molecule, such as a polynucleotide linker or a non-nucleotide linker. In one embodiment, the pyrimidine nucleotides present in the sense strand are 2′-deoxy-2′-fluoro pyrimidine nucleotides and the purine nucleotides present in the sense region are 2′-deoxy purine nucleotides. In another embodiment, the pyrimidine nucleotides present in the sense strand are 2′-deoxy-2′-fluoro pyrimidine nucleotides and the purine nucleotides present in the sense region are 2′-O-methyl purine nucleotides. In one embodiment, wherein the sense strand comprises a 3′-end and a 5′-end, a terminal cap moiety (e.g., an inverted deoxy abasic moiety) is present at the 5′-end, the 3′-end, or both of the 5′ and 3′ ends of the sense strand. In one embodiment, the antisense strand comprises one or more 2′-deoxy-2′-fluoro pyrimidine nucleotides and one or more 2′-O-methyl purine nucleotides. In one embodiment, the pyrimidine nucleotides present in the antisense strand are 2′-deoxy-2′-fluoro pyrimidine nucleotides and any purine nucleotides present in the antisense strand are 2′-O-methyl purine nucleotides. In one embodiment, the antisense strand comprises a phosphorothioate internucleotide linkage at the 3′ end of the antisense strand. In another embodiment, the antisense strand comprises a glyceryl modification at the 3′ end. In another embodiment, the 5′-end of the antisense strand optionally includes a phosphate group. In one embodiment, the invention features a double-stranded short interfering nucleic acid (siNA) molecule that down-regulates expression of a MAP kinase gene, wherein one of the strands of the double-stranded siNA molecule is an antisense strand which comprises nucleotide sequence that is complementary to nucleotide sequence of MAP kinase RNA or a portion thereof, the other strand is a sense strand which comprises nucleotide sequence that is complementary to a nucleotide sequence of the antisense strand and wherein a majority of the pyrimidine nucleotides present in the double-stranded siNA molecule comprises a sugar modification, and wherein the nucleotide sequence of the antisense strand is complementary to a nucleotide sequence of the 5′-untranslated region or a portion thereof of the MAP kinase RNA. In another embodiment, the nucleotide sequence of the antisense strand is complementary to a nucleotide sequence of the MAP kinase RNA or a portion thereof.

[0050] In one embodiment, the invention features a double-stranded short interfering nucleic acid (siNA) molecule that inhibits expression of a MAP kinase gene, wherein one of the strands of the double-stranded siNA molecule is an antisense strand which comprises nucleotide sequence that is complementary to nucleotide sequence of MAP kinase RNA or a portion thereof, the other strand is a sense strand which comprises nucleotide sequence that is complementary to a nucleotide sequence of the antisense strand and wherein a majority of the pyrimidine nucleotides present in the double-stranded siNA molecule comprises a sugar modification, and wherein each of the two strands of the siNA molecule comprises 21 nucleotides. In one embodiment, about 19 nucleotides of each strand of the siNA molecule are base-paired to the complementary nucleotides of the other strand of the siNA molecule and at least two 3′ terminal nucleotides of each strand of the siNA molecule are not base-paired to the nucleotides of the other strand of the siNA molecule. In one embodiment, each of the two 3′ terminal nucleotides of each fragment of the siNA molecule are 2′-deoxy-pyrimidines, such as 2′-deoxy-thymidine. In another embodiment, each strand of the siNA molecule is base-paired to the complementary nucleotides of the other strand of the siNA molecule. In one embodiment, about 19 nucleotides of the antisense strand are base-paired to the nucleotide sequence of the MAP kinase RNA or a portion thereof. In another embodiment, 21 nucleotides of the antisense strand are base-paired to the nucleotide sequence of the MAP kinase RNA or a portion thereof.

[0051] In one embodiment, the invention features a composition comprising a siNA molecule of the invention and a pharmaceutically acceptable carrier or diluent.

[0052] In one embodiment, the invention features the use of a double-stranded short interfering nucleic acid (siNA) molecule that inhibits expression of a MAP kinase gene, wherein one of the strands of the double-stranded siNA molecule is an antisense strand which comprises nucleotide sequence that is complementary to nucleotide sequence of MAP kinase RNA or a portion thereof, the other strand is a sense strand which comprises nucleotide sequence that is complementary to a nucleotide sequence of the antisense strand and wherein a majority of the pyrimidine nucleotides present in the double-stranded siNA molecule comprises a sugar modification.

[0053] In a non-limiting example, the introduction of chemically-modified nucleotides into nucleic acid molecules provides a powerful tool in overcoming potential limitations of in vivo stability and bioavailability inherent to native RNA molecules that are delivered exogenously. For example, the use of chemically-modified nucleic acid molecules can enable a lower dose of a particular nucleic acid molecule for a given therapeutic effect since chemically-modified nucleic acid molecules tend to have a longer half-life in serum. Furthermore, certain chemical modifications can improve the bioavailability of nucleic acid molecules by targeting particular cells or tissues and/or improving cellular uptake of the nucleic acid molecule. Therefore, even if the activity of a chemically-modified nucleic acid molecule is reduced as compared to a native nucleic acid molecule, for example, when compared to an all-RNA nucleic acid molecule, the overall activity of the modified nucleic acid molecule can be greater than that of the native molecule due to improved stability and/or delivery of the molecule. Unlike native unmodified siNA, chemically-modified siNA can also minimize the possibility of activating interferon activity in humans.

[0054] In any of the embodiments of siNA molecules described herein, the antisense region of a siNA molecule of the invention can comprise a phosphorothioate internucleotide linkage at the 3′-end of said antisense region. In any of the embodiments of siNA molecules described herein, the antisense region can comprise about one to about five phosphorothioate internucleotide linkages at the 5′-end of said antisense region. In any of the embodiments of siNA molecules described herein, the 3′-terminal nucleotide overhangs of a siNA molecule of the invention can comprise ribonucleotides or deoxyribonucleotides that are chemically-modified at a nucleic acid sugar, base, or backbone. In any of the embodiments of siNA molecules described herein, the 3′-terminal nucleotide overhangs can comprise one or more universal base ribonucleotides. In any of the embodiments of siNA molecules described herein, the 3′-terminal nucleotide overhangs can comprise one or more acyclic nucleotides.

[0055] One embodiment of the invention provides an expression vector comprising a nucleic acid sequence encoding at least one siNA molecule of the invention in a manner that allows expression of the nucleic acid molecule. Another embodiment of the invention provides a mammalian cell comprising such an expression vector. The mammalian cell can be a human cell. The siNA molecule of the expression vector can comprise a sense region and an antisense region. The antisense region can comprise sequence complementary to an RNA or DNA sequence encoding MAP kinase and the sense region can comprise sequence complementary to the antisense region. The siNA molecule can comprise two distinct strands having complementary sense and antisense regions. The siNA molecule can comprise a single strand having complementary sense and antisense regions.

[0056] In one embodiment, the invention features a chemically-modified short interfering nucleic acid (siNA) molecule capable of mediating RNA interference (RNAi) against a MAP kinase inside a cell or reconstituted in vitro system, wherein the chemical modification comprises one or more (e.g., about 1, 2, 3, 4, 5, 6, 7, 8, 9, 10, or more) nucleotides comprising a backbone modified internucleotide linkage having Formula I:

[chemical structure]

wherein each R1 and R2 is independently any nucleotide, non-nucleotide, or polynucleotide which can be naturally-occurring or chemically-modified, each X and Y is independently O, S, N, alkyl, or substituted alkyl, each Z and W is independently O, S, N, alkyl, substituted alkyl, O-alkyl, S-alkyl, alkaryl, or aralkyl, and wherein W, X, Y, and Z are optionally not all O.

[0057] The chemically-modified internucleotide linkages having Formula I, for example, wherein any Z, W, X, and/or Y independently comprises a sulphur atom, can be present in one or both oligonucleotide strands of the siNA duplex, for example, in the sense strand, the antisense strand, or both strands. The siNA molecules of the invention can comprise one or more (e.g., about 1, 2, 3, 4, 5, 6, 7, 8, 9, 10, or more) chemically-modified internucleotide linkages having Formula I at the 3′-end, the 5′-end, or both of the 3′ and 5′-ends of the sense strand, the antisense strand, or both strands. For example, an exemplary siNA molecule of the invention can comprise about 1 to about 5 or more (e.g., about 1, 2, 3, 4, 5, or more) chemically-modified internucleotide linkages having Formula I at the 5′-end of the sense strand, the antisense strand, or both strands. In another non-limiting example, an exemplary siNA molecule of the invention can comprise one or more (e.g., about 1, 2, 3, 4, 5, 6, 7, 8, 9, 10, or more) pyrimidine nucleotides with chemically-modified internucleotide linkages having Formula I in the sense strand, the antisense strand, or both strands. In yet another non-limiting example, an exemplary siNA molecule of the invention can comprise one or more (e.g., about 1, 2, 3, 4, 5, 6, 7, 8, 9, 10, or more) purine nucleotides with chemically-modified internucleotide linkages having Formula I in the sense strand, the antisense strand, or both strands. In another embodiment, a siNA molecule of the invention having internucleotide linkage(s) of Formula I also comprises a chemically-modified nucleotide or non-nucleotide having any of Formulae I-VII.

[0058] In one embodiment, the invention features a chemically-modified short interfering nucleic acid (siNA) molecule capable of mediating RNA interference (RNAi) against a MAP kinase inside a cell or reconstituted in vitro system, wherein the chemical modification comprises one or more (e.g., about 1, 2, 3, 4, 5, 6, 7, 8, 9, 10, or more) nucleotides or non-nucleotides having Formula II:

[chemical structure]

[0059] wherein each R3, R4, R5, R6, R7, R8, R10, R11 and R12 is independently H, OH, alkyl, substituted alkyl, alkaryl or aralkyl, F, Cl, Br, CN, CF3, OCF₃, OCN, O-alkyl, S-alkyl, N-alkyl, O-alkenyl, S-alkenyl, N-alkenyl, SO-alkyl, alkyl-OH, O-alkyl-OH, O-alkyl-SH, S-alkyl-OH, S-alkyl-SH, alkyl-5-alkyl, alkyl-O-alkyl, ONO2, NO2, N3, NH2, aminoalkyl, aminoacid, aminoacyl, ONH2, O-aminoalkyl, O-aminoacid, O-aminoacyl, heterocycloalkyl, heterocycloalkaryl, aminoalkylamino, polyalklylamino, substituted silyl, or group having Formula I; R9 is O, S, CH2, S═O, CHF, or CF2, and B is a nucleosidic base such as adenine, guanine, uracil, cytosine, thymine, 2-aminoadenosine, 5-methylcytosine, 2,6-diaminopurine, or any other non-naturally occurring base that can be complementary or non-complementary to target RNA or a non-nucleosidic base such as phenyl, naphthyl, 3-nitropyrrole, 5-nitroindole, nebularine, pyridone, pyridinone, or any other non-naturally occurring universal base that can be complementary or non-complementary to target RNA.

[0060] The chemically-modified nucleotide or non-nucleotide of Formula II can be present in one or both oligonucleotide strands of the siNA duplex, for example in the sense strand, the antisense strand, or both strands. The siNA molecules of the invention can comprise one or more chemically-modified nucleotide or non-nucleotide of Formula II at the 3′-end, the 5′-end, or both of the 3′ and 5′-ends of the sense strand, the antisense strand, or both strands. For example, an exemplary siNA molecule of the invention can comprise about 1 to about 5 or more (e.g., about 1, 2, 3, 4, 5, or more) chemically-modified nucleotides or non-nucleotides of Formula II at the 5′-end of the sense strand, the antisense strand, or both strands. In another non-limiting example, an exemplary siNA molecule of the invention can comprise about 1 to about 5 or more (e.g., about 1, 2, 3, 4, 5, or more) chemically-modified nucleotides or non-nucleotides of Formula II at the 3′-end of the sense strand, the antisense strand, or both strands.

[0061] In one embodiment, the invention features a chemically-modified short interfering nucleic acid (siNA) molecule capable of mediating RNA interference (RNAi) against a MAP kinase inside a cell or reconstituted in vitro system, wherein the chemical modification comprises one or more (e.g., about 1, 2, 3, 4, 5, 6, 7, 8, 9, 10, or more) nucleotides or non-nucleotides having Formula III:

[chemical structure]

wherein each R3, R4, R5, R6, R7, R8, R10, R11 and R12 is independently H, OH, alkyl, substituted alkyl, alkaryl or aralkyl, F, Cl, Br, CN, CF3, OCF3, OCN, O-alkyl, S-alkyl, N-alkyl, O-alkenyl, S-alkenyl, N-alkenyl, SO-alkyl, alkyl-OH, O-alkyl-OH, O-alkyl-SH, S-alkyl-OH, S-alkyl-SH, alkyl-5-alkyl, alkyl-O-alkyl, ONO2, NO2, N3, NH2, aminoalkyl, aminoacid, aminoacyl, ONH2, O-aminoalkyl, O-aminoacid, O-aminoacyl, heterocycloalkyl, heterocycloalkaryl, aminoalkylamino, polyalklylamino, substituted silyl, or group having Formula I; R9 is O, S, CH2, S═O, CHF, or CF2, and B is a nucleosidic base such as adenine, guanine, uracil, cytosine, thymine, 2-aminoadenosine, 5-methylcytosine, 2,6-diaminopurine, or any other non-naturally occurring base that can be employed to be complementary or non-complementary to target RNA or a non-nucleosidic base such as phenyl, naphthyl, 3-nitropyrrole, 5-nitroindole, nebularine, pyridone, pyridinone, or any other non-naturally occurring universal base that can be complementary or non-complementary to target RNA.

[0062] The chemically-modified nucleotide or non-nucleotide of Formula III can be present in one or both oligonucleotide strands of the siNA duplex, for example, in the sense strand, the antisense strand, or both strands. The siNA molecules of the invention can comprise one or more chemically-modified nucleotide or non-nucleotide of Formula III at the 3′-end, the 5′-end, or both of the 3′ and 5′-ends of the sense strand, the antisense strand, or both strands. For example, an exemplary siNA molecule of the invention can comprise about 1 to about 5 or more (e.g., about 1, 2, 3, 4, 5, or more) chemically-modified nucleotide(s) or non-nucleotide(s) of Formula III at the 5′-end of the sense strand, the antisense strand, or both strands. In another non-limiting example, an exemplary siNA molecule of the invention can comprise about 1 to about 5 or more (e.g., about 1, 2, 3, 4, 5, or more) chemically-modified nucleotide or non-nucleotide of Formula III at the 3′-end of the sense strand, the antisense strand, or both strands.

[0063] In another embodiment, a siNA molecule of the invention comprises a nucleotide having Formula II or III, wherein the nucleotide having Formula II or III is in an inverted configuration. For example, the nucleotide having Formula II or III is connected to the siNA construct in a 3′-3′,3′-2′,2′-3′, or 5′-5′ configuration, such as at the 3′-end, the 5′-end, or both of the 3′ and 5′-ends of one or both siNA strands.

[0064] In one embodiment, the invention features a chemically-modified short interfering nucleic acid (siNA) molecule capable of mediating RNA interference (RNAi) against a MAP kinase inside a cell or reconstituted in vitro system, wherein the chemical modification comprises a 5′-terminal phosphate group having Formula IV:

[chemical structure]

wherein each X and Y is independently O, S, N, alkyl, substituted alkyl, or alkylhalo; wherein each Z and W is independently O, S, N, alkyl, substituted alkyl, O-alkyl, S-alkyl, alkaryl, aralkyl, or alkylhalo; and wherein W, X, Y and Z are not all O.

[0065] In one embodiment, the invention features a siNA molecule having a 5′-terminal phosphate group having Formula IV on the target-complementary strand, for example, a strand complementary to a target RNA, wherein the siNA molecule comprises an all RNA siNA molecule. In another embodiment, the invention features a siNA molecule having a 5′-terminal phosphate group having Formula IV on the target-complementary strand wherein the siNA molecule also comprises about 1 to about 3 (e.g., about 1, 2, or 3) nucleotide 3′-terminal nucleotide overhangs having about 1 to about 4 (e.g., about 1, 2, 3, or 4) deoxyribonucleotides on the 3′-end of one or both strands. In another embodiment, a 5′-terminal phosphate group having Formula IV is present on the target-complementary strand of a siNA molecule of the invention, for example a siNA molecule having chemical modifications having any of Formulae I-VII.

[0066] In one embodiment, the invention features a chemically-modified short interfering nucleic acid (siNA) molecule capable of mediating RNA interference (RNAi) against a MAP kinase inside a cell or reconstituted in vitro system, wherein the chemical modification comprises one or more phosphorothioate internucleotide linkages. For example, in a non-limiting example, the invention features a chemically-modified short interfering nucleic acid (siNA) having about 1, 2, 3, 4, 5, 6, 7, 8 or more phosphorothioate internucleotide linkages in one siNA strand. In yet another embodiment, the invention features a chemically-modified short interfering nucleic acid (siNA) individually having about 1, 2, 3, 4, 5, 6, 7, 8 or more phosphorothioate internucleotide linkages in both siNA strands. The phosphorothioate internucleotide linkages can be present in one or both oligonucleotide strands of the siNA duplex, for example in the sense strand, the antisense strand, or both strands. The siNA molecules of the invention can comprise one or more phosphorothioate internucleotide linkages at the 3′-end, the 5′-end, or both of the 3′- and 5′-ends of the sense strand, the antisense strand, or both strands. For example, an exemplary siNA molecule of the invention can comprise about 1 to about 5 or more (e.g., about 1, 2, 3, 4, 5, or more) consecutive phosphorothioate internucleotide linkages at the 5′-end of the sense strand, the antisense strand, or both strands. In another non-limiting example, an exemplary siNA molecule of the invention can comprise one or more (e.g., about 1, 2, 3, 4, 5, 6, 7, 8, 9, 10, or more) pyrimidine phosphorothioate internucleotide linkages in the sense strand, the antisense strand, or both strands. In yet another non-limiting example, an exemplary siNA molecule of the invention can comprise one or more (e.g., about 1, 2, 3, 4, 5, 6, 7, 8, 9, 10, or more) purine phosphorothioate internucleotide linkages in the sense strand, the antisense strand, or both strands.

[0067] In one embodiment, the invention features a siNA molecule, wherein the sense strand comprises one or more, for example, about 1, 2, 3, 4, 5, 6, 7, 8, 9, 10, or more phosphorothioate internucleotide linkages, and/or one or more (e.g., about 1, 2, 3, 4, 5, 6, 7, 8, 9, 10 or more) 2′-deoxy, 2′-O-methyl, 2′-deoxy-2′-fluoro, and/or about one or more (e.g., about 1, 2, 3, 4, 5, 6, 7, 8, 9, 10 or more) universal base modified nucleotides, and optionally a terminal cap molecule at the 3′-end, the 5′-end, or both of the 3′- and 5′-ends of the sense strand; and wherein the antisense strand comprises about 1 to about 10 or more, specifically about 1, 2, 3, 4, 5, 6, 7, 8, 9, 10, or more phosphorothioate internucleotide linkages, and/or one or more (e.g., about 1, 2, 3, 4, 5, 6, 7, 8, 9, 10 or more) 2′-deoxy, 2′-O-methyl, 2′-deoxy-2′-fluoro, and/or one or more (e.g., about 1, 2, 3, 4, 5, 6, 7, 8, 9, 10 or more) universal base modified nucleotides, and optionally a terminal cap molecule at the 3′-end, the 5′-end, or both of the 3′- and 5′-ends of the antisense strand. In another embodiment, one or more, for example about 1, 2, 3, 4, 5, 6, 7, 8, 9, 10, or more, pyrimidine nucleotides of the sense and/or antisense siNA strand are chemically-modified with 2′-deoxy, 2′-O-methyl and/or 2′-deoxy-2′-fluoro nucleotides, with or without one or more, for example about 1, 2, 3, 4, 5, 6, 7, 8, 9, 10, or more, phosphorothioate internucleotide linkages and/or a terminal cap molecule at the 3′-end, the 5′-end, or both of the 3′- and 5′-ends, being present in the same or different strand.

[0068] In another embodiment, the invention features a siNA molecule, wherein the sense strand comprises about 1 to about 5, specifically about 1, 2, 3, 4, or 5 phosphorothioate internucleotide linkages, and/or one or more (e.g., about 1, 2, 3, 4, 5, or more) 2′-deoxy, 2′-O-methyl, 2′-deoxy-2′-fluoro, and/or one or more (e.g., about 1, 2, 3, 4, 5, or more) universal base modified nucleotides, and optionally a terminal cap molecule at the 3-end, the 5′-end, or both of the 3′- and 5′-ends of the sense strand; and wherein the antisense strand comprises about 1 to about 5 or more, specifically about 1, 2, 3, 4, 5, or more phosphorothioate internucleotide linkages, and/or one or more (e.g., about 1, 2, 3, 4, 5, 6, 7, 8, 9, 10 or more) 2′-deoxy, 2′-O-methyl, 2′-deoxy-2′-fluoro, and/or one or more (e.g., about 1, 2, 3, 4, 5, 6, 7, 8, 9, 10 or more) universal base modified nucleotides, and optionally a terminal cap molecule at the 3′-end, the 5′-end, or both of the 3′- and 5′-ends of the antisense strand. In another embodiment, one or more, for example about 1, 2, 3, 4, 5, 6, 7, 8, 9, 10, or more, pyrimidine nucleotides of the sense and/or antisense siNA strand are chemically-modified with 2′-deoxy, 2′-O-methyl and/or 2′-deoxy-2′-fluoro nucleotides, with or without about 1 to about 5 or more, for example about 1, 2, 3, 4, 5, or more phosphorothioate internucleotide linkages and/or a terminal cap molecule at the 3′-end, the 5′-end, or both of the 3′- and 5′-ends, being present in the same or different strand.

[0069] In one embodiment, the invention features a siNA molecule, wherein the sense strand comprises one or more, for example, about 1, 2, 3, 4, 5, 6, 7, 8, 9, 10, or more phosphorothioate internucleotide linkages, and/or about one or more (e.g., about 1, 2, 3, 4, 5, 6, 7, 8, 9, 10 or more) 2′-deoxy, 2′-O-methyl, 2′-deoxy-2′-fluoro, and/or one or more (e.g., about 1, 2, 3, 4, 5, 6, 7, 8, 9, 10 or more) universal base modified nucleotides, and optionally a terminal cap molecule at the 3′-end, the 5′-end, or both of the 3′- and 5′-ends of the sense strand; and wherein the antisense strand comprises about 1 to about 10 or more, specifically about 1, 2, 3, 4, 5, 6, 7, 8, 9, 10 or more phosphorothioate internucleotide linkages, and/or one or more (e.g., about 1, 2, 3, 4, 5, 6, 7, 8, 9, 10 or more) 2′-deoxy, 2′-O-methyl, 2′-deoxy-2′-fluoro, and/or one or more (e.g., about 1, 2, 3, 4, 5, 6, 7, 8, 9, 10 or more) universal base modified nucleotides, and optionally a terminal cap molecule at the 3′-end, the 5′-end, or both of the 3′- and 5′-ends of the antisense strand. In another embodiment, one or more, for example about 1, 2, 3, 4, 5, 6, 7, 8, 9, 10 or more pyrimidine nucleotides of the sense and/or antisense siNA strand are chemically-modified with 2′-deoxy, 2′-O-methyl and/or 2′-deoxy-2′-fluoro nucleotides, with or without one or more, for example, about 1, 2, 3, 4, 5, 6, 7, 8, 9, or more phosphorothioate internucleotide linkages and/or a terminal cap molecule at the 3′-end, the 5′-end, or both of the 3′ and 5′-ends, being present in the same or different strand.

[0070] In another embodiment, the invention features a siNA molecule, wherein the sense strand comprises about 1 to about 5 or more, specifically about 1, 2, 3, 4, 5 or more phosphorothioate internucleotide linkages, and/or one or more (e.g., about 1, 2, 3, 4, 5, 6, 7, 8, 9, 10 or more) 2′-deoxy, 2′-O-methyl, 2′-deoxy-2′-fluoro, and/or one or more (e.g., about 1, 2, 3, 4, 5, 6, 7, 8, 9, 10 or more) universal base modified nucleotides, and optionally a terminal cap molecule at the 3′-end, the 5′-end, or both of the 3′- and 5′-ends of the sense strand; and wherein the antisense strand comprises about 1 to about 5 or more, specifically about 1, 2, 3, 4, 5 or more phosphorothioate internucleotide linkages, and/or one or more (e.g., about 1, 2, 3, 4, 5, 6, 7, 8, 9, 10 or more) 2′-deoxy, 2′-O-methyl, 2′-deoxy-2′-fluoro, and/or one or more (e.g., about 1, 2, 3, 4, 5, 6, 7, 8, 9, 10 or more) universal base modified nucleotides, and optionally a terminal cap molecule at the 3′-end, the 5′-end, or both of the 3′- and 5′-ends of the antisense strand. In another embodiment, one or more, for example about 1, 2, 3, 4, 5, 6, 7, 8, 9, 10 or more pyrimidine nucleotides of the sense and/or antisense siNA strand are chemically-modified with 2′-deoxy, 2′-O-methyl and/or 2′-deoxy-2′-fluoro nucleotides, with or without about 1 to about 5, for example about 1, 2, 3, 4, 5 or more phosphorothioate internucleotide linkages and/or a terminal cap molecule at the 3′-end, the 5′-end, or both of the 3′- and 5′-ends, being present in the same or different strand.

[0071] In one embodiment, the invention features a chemically-modified short interfering nucleic acid (siNA) molecule having about 1 to about 5, specifically about 1, 2, 3, 4, 5 or more phosphorothioate internucleotide linkages in each strand of the siNA molecule.

[0072] In another embodiment, the invention features a siNA molecule comprising 2′-5′ internucleotide linkages. The 2′-5′ internucleotide linkage(s) can be at the 3′-end, the 5′-end, or both of the 3′- and 5′-ends of one or both siNA sequence strands. In addition, the 2′-5′ internucleotide linkage(s) can be present at various other positions within one or both siNA sequence strands, for example, about 1, 2, 3, 4, 5, 6, 7, 8, 9, 10, or more including every internucleotide linkage of a pyrimidine nucleotide in one or both strands of the siNA molecule can comprise a 2′-5′ internucleotide linkage, or about 1, 2, 3, 4, 5, 6, 7, 8, 9, 10, or more including every internucleotide linkage of a purine nucleotide in one or both strands of the siNA molecule can comprise a 2′-5′ internucleotide linkage.

[0073] In another embodiment, a chemically-modified siNA molecule of the invention comprises a duplex having two strands, one or both of which can be chemically-modified, wherein each strand is about 18 to about 27 (e.g., about 18, 19, 20, 21, 22, 23, 24, 25, 26, or 27) nucleotides in length, wherein the duplex has about 18 to about 23 (e.g., about 18, 19, 20, 21, 22, or 23) base pairs, and wherein the chemical modification comprises a structure having any of Formulae I-VII. For example, an exemplary chemically-modified siNA molecule of the invention comprises a duplex having two strands, one or both of which can be chemically-modified with a chemical modification having any of Formulae I-VII or any combination thereof, wherein each strand consists of about 21 nucleotides, each having a 2-nucleotide 3′-terminal nucleotide overhang, and wherein the duplex has about 19 base pairs. In another embodiment, a siNA molecule of the invention comprises a single stranded hairpin structure, wherein the siNA is about 36 to about 70 (e.g., about 36, 40, 45, 50, 55, 60, 65, or 70) nucleotides in length having about 18 to about 23 (e.g., about 18, 19, 20, 21, 22, or 23) base pairs, and wherein the siNA can include a chemical modification comprising a structure having any of Formulae I-VII or any combination thereof. For example, an exemplary chemically-modified siNA molecule of the invention comprises a linear oligonucleotide having about 42 to about 50 (e.g., about 42, 43, 44, 45, 46, 47, 48, 49, or 50) nucleotides that is chemically-modified with a chemical modification having any of Formulae I-VII or any combination thereof, wherein the linear oligonucleotide forms a hairpin structure having about 19 base pairs and a 2-nucleotide 3′-terminal nucleotide overhang. In another embodiment, a linear hairpin siNA molecule of the invention contains a stem loop motif, wherein the loop portion of the siNA molecule is biodegradable. For example, a linear hairpin siNA molecule of the invention is designed such that degradation of the loop portion of the siNA molecule in vivo can generate a double-stranded siNA molecule with 3′-terminal overhangs, such as 3′-terminal nucleotide overhangs comprising about 2 nucleotides.

[0074] In another embodiment, a siNA molecule of the invention comprises a circular nucleic acid molecule, wherein the siNA is about 38 to about 70 (e.g., about 38, 40, 45, 50, 55, 60, 65, or 70) nucleotides in length having about 18 to about 23 (e.g., about 18, 19, 20, 21, 22, or 23) base pairs, and wherein the siNA can include a chemical modification, which comprises a structure having any of Formulae I-VII or any combination thereof. For example, an exemplary chemically-modified siNA molecule of the invention comprises a circular oligonucleotide having about 42 to about 50 (e.g., about 42, 43, 44, 45, 46, 47, 48, 49, or 50) nucleotides that is chemically-modified with a chemical modification having any of Formulae I-VII or any combination thereof, wherein the circular oligonucleotide forms a dumbbell shaped structure having about 19 base pairs and 2 loops.

[0075] In another embodiment, a circular siNA molecule of the invention contains two loop motifs, wherein one or both loop portions of the siNA molecule is biodegradable. For example, a circular siNA molecule of the invention is designed such that degradation of the loop portions of the siNA molecule in vivo can generate a double-stranded siNA molecule with 3′-terminal overhangs, such as 3′-terminal nucleotide overhangs comprising about 2 nucleotides.

[0076] In one embodiment, a siNA molecule of the invention comprises at least one (e.g., about 1, 2, 3, 4, 5, 6, 7, 8, 9, 10, or more) abasic moiety, for example a compound having Formula V:

[chemical structure]

wherein each R3, R4, R5, R6, R7, R8, R10, R11, R12, and R13 is independently H, OH, alkyl, substituted alkyl, alkaryl or aralkyl, F, Cl, Br, CN, CF3, OCF3, OCN, O-alkyl, S-alkyl, N-alkyl, O-alkenyl, S-alkenyl, N-alkenyl, SO-alkyl, alkyl-OH, O-alkyl-OH, O-alkyl-SH, S-alkyl-OH, S-alkyl-SH, alkyl-5-alkyl, alkyl-O-alkyl, ONO2, NO2, N3, NH2, aminoalkyl, aminoacid, aminoacyl, ONH2, O-aminoalkyl, O-aminoacid, O-aminoacyl, heterocycloalkyl, heterocycloalkaryl, aminoalkylamino, polyalklylamino, substituted silyl, or group having Formula I; R9 is O, S, CH2, S═O, CHF, or CF2.

[0077] In one embodiment, a siNA molecule of the invention comprises at least one (e.g., about 1, 2, 3, 4, 5, 6, 7, 8, 9, 10, or more) inverted abasic moiety, for example a compound having Formula VI:

[chemical structure]

wherein each R3, R4, R5, R6, R7, R8, R10, R11, R12, and R13 is independently H, OH, alkyl, substituted alkyl, alkaryl or aralkyl, F, Cl, Br, CN, CF3, OCF3, OCN, O-alkyl, S-alkyl, N-alkyl, O-alkenyl, S-alkenyl, N-alkenyl, SO-alkyl, alkyl-OH, O-alkyl-OH, O-alkyl-SH, S-alkyl-OH, S-alkyl-SH, alkyl-5-alkyl, alkyl-O-alkyl, ONO2, NO2, N3, NH2, aminoalkyl, aminoacid, aminoacyl, ONH2, O-aminoalkyl, O-aminoacid, O-aminoacyl, heterocycloalkyl, heterocycloalkaryl, aminoalkylamino, polyalklylamino, substituted silyl, or group having Formula I; R9 is O, S, CH2, S═O, CHF, or CF2, and either R2, R3, R8 or R13 serve as points of attachment to the siNA molecule of the invention.

[0078] In another embodiment, a siNA molecule of the invention comprises at least one (e.g., about 1, 2, 3, 4, 5, 6, 7, 8, 9, 10, or more) substituted polyalkyl moieties, for example a compound having Formula VII:

[chemical structure]

wherein each n is independently an integer from 1 to 12, each R1, R2 and R3 is independently H, OH, alkyl, substituted alkyl, alkaryl or aralkyl, F, Cl, Br, CN, CF3, OCF3, OCN, O-alkyl, S-alkyl, N-alkyl, O-alkenyl, S-alkenyl, N-alkenyl, SO-alkyl, alkyl-OH, O-alkyl-OH, O-alkyl-SH, S-alkyl-OH, S-alkyl-SH, alkyl-5-alkyl, alkyl-O-alkyl, ONO2, NO2, N3, NH2, aminoalkyl, aminoacid, aminoacyl, ONH2, O-aminoalkyl, O-aminoacid, O-aminoacyl, heterocycloalkyl, heterocycloalkaryl, aminoalkylamino, polyalklylamino, substituted silyl, or a group having Formula I, and R1, R2 or R3 serves as points of attachment to the siNA molecule of the invention.

[0079] In another embodiment, the invention features a compound having Formula VII, wherein R1 and R2 are hydroxyl (OH) groups, n=1, and R3 comprises 0 and is the point of attachment to the 3′-end, the 5′-end, or both of the 3′ and 5′-ends of one or both strands of a double-stranded siNA molecule of the invention or to a single-stranded siNA molecule of the invention. This modification is referred to herein as “glyceryl” (for example modification 6 in FIG. 10).

[0080] In another embodiment, a moiety having any of Formula V, VI or VII of the invention is at the 3′-end, the 5′-end, or both of the 3′ and 5′-ends of a siNA molecule of the invention. For example, a moiety having Formula V, VI or VII can be present at the 3′-end, the 5′-end, or both of the 3′ and 5′-ends of the antisense strand, the sense strand, or both antisense and sense strands of the siNA molecule. In addition, a moiety having Formula VII can be present at the 3′-end or the 5′-end of a hairpin siNA molecule as described herein.

[0081] In another embodiment, a siNA molecule of the invention comprises an abasic residue having Formula V or VI, wherein the abasic residue having Formula VI or VI is connected to the siNA construct in a 3′-3′,3′-2′,2′-3′, or 5′-5′ configuration, such as at the 3′-end, the 5′-end, or both of the 3′ and 5′-ends of one or both siNA strands.

[0082] In one embodiment, a siNA molecule of the invention comprises one or more (e.g., about 1, 2, 3, 4, 5, 6, 7, 8, 9, 10, or more) locked nucleic acid (LNA) nucleotides, for example at the 5′-end, the 3′-end, both of the 5′ and 3′-ends, or any combination thereof, of the siNA molecule.

[0083] In another embodiment, a siNA molecule of the invention comprises one or more (e.g., about 1, 2, 3, 4, 5, 6, 7, 8, 9, 10, or more) acyclic nucleotides, for example at the 5′-end, the 3′-end, both of the 5′ and 3′-ends, or any combination thereof, of the siNA molecule.

[0084] In one embodiment, the invention features a chemically-modified short interfering nucleic acid (siNA) molecule of the invention, wherein the chemically-modified siNA comprises a sense region, where any (e.g., one or more or all) pyrimidine nucleotides present in the sense region are 2′-deoxy-2′-fluoro pyrimidine nucleotides (e.g., wherein all pyrimidine nucleotides are 2′-deoxy-2′-fluoro pyrimidine nucleotides or alternately a plurality of pyrimidine nucleotides are 2′-deoxy-2′-fluoro pyrimidine nucleotides), and where any (e.g., one or more or all) purine nucleotides present in the sense region are 2′-deoxy purine nucleotides (e.g., wherein all purine nucleotides are 2′-deoxy purine nucleotides or alternately a plurality of purine nucleotides are 2′-deoxy purine nucleotides).

[0085] In one embodiment, the invention features a chemically-modified short interfering nucleic acid (siNA) molecule of the invention, wherein the chemically-modified siNA comprises a sense region, where any (e.g., one or more or all) pyrimidine nucleotides present in the sense region are 2′-deoxy-2′-fluoro pyrimidine nucleotides (e.g., wherein all pyrimidine nucleotides are 2′-deoxy-2′-fluoro pyrimidine nucleotides or alternately a plurality of pyrimidine nucleotides are 2′-deoxy-2′-fluoro pyrimidine nucleotides), and where any (e.g., one or more or all) purine nucleotides present in the sense region are 2′-deoxy purine nucleotides (e.g., wherein all purine nucleotides are 2′-deoxy purine nucleotides or alternately a plurality of purine nucleotides are 2′-deoxy purine nucleotides), wherein any nucleotides comprising a 3′-terminal nucleotide overhang that are present in said sense region are 2′-deoxy nucleotides.

[0086] In one embodiment, the invention features a chemically-modified short interfering nucleic acid (siNA) molecule of the invention, wherein the chemically-modified siNA comprises a sense region, where any (e.g., one or more or all) pyrimidine nucleotides present in the sense region are 2′-deoxy-2′-fluoro pyrimidine nucleotides (e.g., wherein all pyrimidine nucleotides are 2′-deoxy-2′-fluoro pyrimidine nucleotides or alternately a plurality of pyrimidine nucleotides are 2′-deoxy-2′-fluoro pyrimidine nucleotides), and where any (e.g., one or more or all) purine nucleotides present in the sense region are 2′-O-methyl purine nucleotides (e.g., wherein all purine nucleotides are 2′-O-methyl purine nucleotides or alternately a plurality of purine nucleotides are 2′-O-methyl purine nucleotides).

[0087] In one embodiment, the invention features a chemically-modified short interfering nucleic acid (siNA) molecule of the invention, wherein the chemically-modified siNA comprises a sense region, where any (e.g., one or more or all) pyrimidine nucleotides present in the sense region are 2′-deoxy-2′-fluoro pyrimidine nucleotides (e.g., wherein all pyrimidine nucleotides are 2′-deoxy-2′-fluoro pyrimidine nucleotides or alternately a plurality of pyrimidine nucleotides are 2′-deoxy-2′-fluoro pyrimidine nucleotides), and where any (e.g., one or more or all) purine nucleotides present in the sense region are 2′-O-methyl purine nucleotides (e.g., wherein all purine nucleotides are 2′-O-methyl purine nucleotides or alternately a plurality of purine nucleotides are 2′-O-methyl purine nucleotides), wherein any nucleotides comprising a 3′-terminal nucleotide overhang that are present in said sense region are 2′-deoxy nucleotides.

[0088] In one embodiment, the invention features a chemically-modified short interfering nucleic acid (siNA) molecule of the invention, wherein the chemically-modified siNA comprises an antisense region, where any (e.g., one or more or all) pyrimidine nucleotides present in the antisense region are 2′-deoxy-2′-fluoro pyrimidine nucleotides (e.g., wherein all pyrimidine nucleotides are 2′-deoxy-2′-fluoro pyrimidine nucleotides or alternately a plurality of pyrimidine nucleotides are 2′-deoxy-2′-fluoro pyrimidine nucleotides), and wherein any (e.g., one or more or all) purine nucleotides present in the antisense region are 2′-O-methyl purine nucleotides (e.g., wherein all purine nucleotides are 2′-O-methyl purine nucleotides or alternately a plurality of purine nucleotides are 2′-O-methyl purine nucleotides).

[0089] In one embodiment, the invention features a chemically-modified short interfering nucleic acid (siNA) molecule of the invention, wherein the chemically-modified siNA comprises an antisense region, where any (e.g., one or more or all) pyrimidine nucleotides present in the antisense region are 2′-deoxy-2′-fluoro pyrimidine nucleotides (e.g., wherein all pyrimidine nucleotides are 2′-deoxy-2′-fluoro pyrimidine nucleotides or alternately a plurality of pyrimidine nucleotides are 2′-deoxy-2′-fluoro pyrimidine nucleotides), and wherein any (e.g., one or more or all) purine nucleotides present in the antisense region are 2′-O-methyl purine nucleotides (e.g., wherein all purine nucleotides are 2′-O-methyl purine nucleotides or alternately a plurality of purine nucleotides are 2′-O-methyl purine nucleotides), wherein any nucleotides comprising a 3′-terminal nucleotide overhang that are present in said antisense region are 2′-deoxy nucleotides.

[0090] In one embodiment, the invention features a chemically-modified short interfering nucleic acid (siNA) molecule of the invention, wherein the chemically-modified siNA comprises an antisense region, where any (e.g., one or more or all) pyrimidine nucleotides present in the antisense region are 2′-deoxy-2′-fluoro pyrimidine nucleotides (e.g., wherein all pyrimidine nucleotides are 2′-deoxy-2′-fluoro pyrimidine nucleotides or alternately a plurality of pyrimidine nucleotides are 2′-deoxy-2′-fluoro pyrimidine nucleotides), and where any (e.g., one or more or all) purine nucleotides present in the antisense region are 2′-deoxy purine nucleotides (e.g., wherein all purine nucleotides are 2′-deoxy purine nucleotides or alternately a plurality of purine nucleotides are 2′-deoxy purine nucleotides).

[0091] In one embodiment, the invention features a chemically-modified short interfering nucleic acid (siNA) molecule of the invention, wherein the chemically-modified siNA comprises an antisense region, where any (e.g., one or more or all) pyrimidine nucleotides present in the antisense region are 2′-deoxy-2′-fluoro pyrimidine nucleotides (e.g., wherein all pyrimidine nucleotides are 2′-deoxy-2′-fluoro pyrimidine nucleotides or alternately a plurality of pyrimidine nucleotides are 2′-deoxy-2′-fluoro pyrimidine nucleotides), and where any (e.g., one or more or all) purine nucleotides present in the antisense region are 2′-O-methyl purine nucleotides (e.g., wherein all purine nucleotides are 2′-O-methyl purine nucleotides or alternately a plurality of purine nucleotides are 2′-O-methyl purine nucleotides).

[0092] In one embodiment, the invention features a chemically-modified short interfering nucleic acid (siNA) molecule of the invention capable of mediating RNA interference (RNAi) against a MAP kinase inside a cell or reconstituted in vitro system, wherein the chemically-modified siNA comprises a sense region, where one or more pyrimidine nucleotides present in the sense region are 2′-deoxy-2′-fluoro pyrimidine nucleotides (e.g., wherein all pyrimidine nucleotides are 2′-deoxy-2′-fluoro pyrimidine nucleotides or alternately a plurality of pyrimidine nucleotides are 2′-deoxy-2′-fluoro pyrimidine nucleotides), and where one or more purine nucleotides present in the sense region are 2′-deoxy purine nucleotides (e.g., wherein all purine nucleotides are 2′-deoxy purine nucleotides or alternately a plurality of purine nucleotides are 2′-deoxy purine nucleotides), and inverted deoxy abasic modifications that are optionally present at the 3′-end, the 5′-end, or both of the 3′ and 5′-ends of the sense region, the sense region optionally further comprising a 3′-terminal overhang having about 1 to about 4 (e.g., about 1, 2, 3, or 4) 2′-deoxyribonucleotides; and wherein the chemically-modified short interfering nucleic acid molecule comprises an antisense region, where one or more pyrimidine nucleotides present in the antisense region are 2′-deoxy-2′-fluoro pyrimidine nucleotides (e.g., wherein all pyrimidine nucleotides are 2′-deoxy-2′-fluoro pyrimidine nucleotides or alternately a plurality of pyrimidine nucleotides are 2′-deoxy-2′-fluoro pyrimidine nucleotides), and wherein one or more purine nucleotides present in the antisense region are 2′-O-methyl purine nucleotides (e.g., wherein all purine nucleotides are 2′-O-methyl purine nucleotides or alternately a plurality of purine nucleotides are 2′-O-methyl purine nucleotides), and a terminal cap modification, such as any modification described herein or shown in FIG. 10, that is optionally present at the 3′-end, the 5′-end, or both of the 3′ and 5′-ends of the antisense sequence, the antisense region optionally further comprising a 3′-terminal nucleotide overhang having about 1 to about 4 (e.g., about 1, 2, 3, or 4) 2′-deoxynucleotides, wherein the overhang nucleotides can further comprise one or more (e.g., 1, 2, 3, or 4) phosphorothioate internucleotide linkages. Non-limiting examples of these chemically-modified siNAs are shown in FIGS. 4 and 5 and Tables III and IV herein.

[0093] In one embodiment, the invention features a chemically-modified short interfering nucleic acid (siNA) molecule of the invention capable of mediating RNA interference (RNAi) against a MAP kinase inside a cell or reconstituted in vitro system, wherein the chemically-modified siNA comprises a sense region, where one or more pyrimidine nucleotides present in the sense region are 2′-deoxy-2′-fluoro pyrimidine nucleotides (e.g., wherein all pyrimidine nucleotides are 2′-deoxy-2′-fluoro pyrimidine nucleotides or alternately a plurality of pyrimidine nucleotides are 2′-deoxy-2′-fluoro pyrimidine nucleotides), and where one or more purine nucleotides present in the sense region are 2′-O-methyl purine nucleotides (e.g., wherein all purine nucleotides are 2′-O-methyl purine nucleotides or alternately a plurality of purine nucleotides are 2′-O-methyl purine nucleotides), and inverted deoxy abasic modifications that are optionally present at the 3′-end, the 5′-end, or both of the 3′ and 5′-ends of the sense region, the sense region optionally further comprising a 3′-terminal overhang having about 1 to about 4 (e.g., about 1, 2, 3, or 4) 2′-deoxyribonucleotides; and wherein the chemically-modified short interfering nucleic acid molecule comprises an antisense region, where one or more pyrimidine nucleotides present in the antisense region are 2′-deoxy-2′-fluoro pyrimidine nucleotides (e.g., wherein all pyrimidine nucleotides are 2′-deoxy-2′-fluoro pyrimidine nucleotides or alternately a plurality of pyrimidine nucleotides are 2′-deoxy-2′-fluoro pyrimidine nucleotides), and wherein one or more purine nucleotides present in the antisense region are 2′-O-methyl purine nucleotides (e.g., wherein all purine nucleotides are 2′-O-methyl purine nucleotides or alternately a plurality of purine nucleotides are 2′-O-methyl purine nucleotides), and a terminal cap modification, such as any modification described herein or shown in FIG. 10, that is optionally present at the 3′-end, the 5′-end, or both of the 3′ and 5′-ends of the antisense sequence, the antisense region optionally further comprising a 3′-terminal nucleotide overhang having about 1 to about 4 (e.g., about 1, 2, 3, or 4) 2′-deoxynucleotides, wherein the overhang nucleotides can further comprise one or more (e.g., 1, 2, 3, or 4) phosphorothioate internucleotide linkages. Non-limiting examples of these chemically-modified siNAs are shown in FIGS. 4 and 5 and Tables III and IV herein.

[0094] In one embodiment, the invention features a chemically-modified short interfering nucleic acid (siNA) molecule of the invention capable of mediating RNA interference (RNAi) against a MAP kinase inside a cell or reconstituted in vitro system, wherein the siNA comprises a sense region, where one or more pyrimidine nucleotides present in the sense region are 2′-deoxy-2′-fluoro pyrimidine nucleotides (e.g., wherein all pyrimidine nucleotides are 2′-deoxy-2′-fluoro pyrimidine nucleotides or alternately a plurality of pyrimidine nucleotides are 2′-deoxy-2′-fluoro pyrimidine nucleotides), and where one or more purine nucleotides present in the sense region are purine ribonucleotides (e.g., wherein all purine nucleotides are purine ribonucleotides or alternately a plurality of purine nucleotides are purine ribonucleotides), and inverted deoxy abasic modifications that are optionally present at the 3′-end, the 5′-end, or both of the 3′ and 5′-ends of the sense region, the sense region optionally further comprising a 3′-terminal overhang having about 1 to about 4 (e.g., about 1, 2, 3, or 4) 2′-deoxyribonucleotides; and wherein the siNA comprises an antisense region, where one or more pyrimidine nucleotides present in the antisense region are 2′-deoxy-2′-fluoro pyrimidine nucleotides (e.g., wherein all pyrimidine nucleotides are 2′-deoxy-2′-fluoro pyrimidine nucleotides or alternately a plurality of pyrimidine nucleotides are 2′-deoxy-2′-fluoro pyrimidine nucleotides), and wherein any purine nucleotides present in the antisense region are 2′-O-methyl purine nucleotides (e.g., wherein all purine nucleotides are 2′-O-methyl purine nucleotides or alternately a plurality of purine nucleotides are 2′-O-methyl purine nucleotides), and a terminal cap modification, such as any modification described herein or shown in FIG. 10, that is optionally present at the 3′-end, the 5′-end, or both of the 3′ and 5′-ends of the antisense sequence, the antisense region optionally further comprising a 3′-terminal nucleotide overhang having about 1 to about 4 (e.g., about 1, 2, 3, or 4) 2′-deoxynucleotides, wherein the overhang nucleotides can further comprise one or more (e.g., 1, 2, 3, or 4) phosphorothioate internucleotide linkages. Non-limiting examples of these chemically-modified siNAs are shown in FIGS. 4 and 5 and Tables III and IV herein.

[0095] In one embodiment, the invention features a chemically-modified short interfering nucleic acid (siNA) molecule of the invention capable of mediating RNA interference (RNAi) against a MAP kinase inside a cell or reconstituted in vitro system, wherein the chemically-modified siNA comprises a sense region, where one or more pyrimidine nucleotides present in the sense region are 2′-deoxy-2′-fluoro pyrimidine nucleotides (e.g., wherein all pyrimidine nucleotides are 2′-deoxy-2′-fluoro pyrimidine nucleotides or alternately a plurality of pyrimidine nucleotides are 2′-deoxy-2′-fluoro pyrimidine nucleotides), and for example where one or more purine nucleotides present in the sense region are selected from the group consisting of 2′-deoxy nucleotides, locked nucleic acid (LNA) nucleotides, 2′-methoxyethyl nucleotides, 4′-thionucleotides, and 2′-O-methyl nucleotides (e.g., wherein all purine nucleotides are selected from the group consisting of 2′-deoxy nucleotides, locked nucleic acid (LNA) nucleotides, 2′-methoxyethyl nucleotides, 4′-thionucleotides, and 2′-O-methyl nucleotides or alternately a plurality of purine nucleotides are selected from the group consisting of 2′-deoxy nucleotides, locked nucleic acid (LNA) nucleotides, 2′-methoxyethyl nucleotides, 4′-thionucleotides, and 2′-O-methyl nucleotides), and wherein inverted deoxy abasic modifications are optionally present at the 3′-end, the 5′-end, or both of the 3′ and 5′-ends of the sense region, the sense region optionally further comprising a 3′-terminal overhang having about 1 to about 4 (e.g., about 1, 2, 3, or 4) 2′-deoxyribonucleotides; and wherein the chemically-modified short interfering nucleic acid molecule comprises an antisense region, where one or more pyrimidine nucleotides present in the antisense region are 2′-deoxy-2′-fluoro pyrimidine nucleotides (e.g., wherein all pyrimidine nucleotides are 2′-deoxy-2′-fluoro pyrimidine nucleotides or alternately a plurality of pyrimidine nucleotides are 2′-deoxy-2′-fluoro pyrimidine nucleotides), and wherein one or more purine nucleotides present in the antisense region are selected from the group consisting of 2′-deoxy nucleotides, locked nucleic acid (LNA) nucleotides, 2′-methoxyethyl nucleotides, 4′-thionucleotides, and 2′-O-methyl nucleotides (e.g., wherein all purine nucleotides are selected from the group consisting of 2′-deoxy nucleotides, locked nucleic acid (LNA) nucleotides, 2′-methoxyethyl nucleotides, 4′-thionucleotides, and 2′-O-methyl nucleotides or alternately a plurality of purine nucleotides are selected from the group consisting of 2′-deoxy nucleotides, locked nucleic acid (LNA) nucleotides, 2′-methoxyethyl nucleotides, 4′-thionucleotides, and 2′-O-methyl nucleotides), and a terminal cap modification, such as any modification described herein or shown in FIG. 10, that is optionally present at the 3′-end, the 5′-end, or both of the 3′ and 5′-ends of the antisense sequence, the antisense region optionally further comprising a 3′-terminal nucleotide overhang having about 1 to about 4 (e.g., about 1, 2, 3, or 4) 2′-deoxynucleotides, wherein the overhang nucleotides can further comprise one or more (e.g., 1, 2, 3, or 4) phosphorothioate internucleotide linkages.

[0096] In another embodiment, any modified nucleotides present in the siNA molecules of the invention, preferably in the antisense strand of the siNA molecules of the invention, but also optionally in the sense and/or both antisense and sense strands, comprise modified nucleotides having properties or characteristics similar to naturally occurring ribonucleotides. For example, the invention features siNA molecules including modified nucleotides having a Northern conformation (e.g., Northern pseudorotation cycle, see for example Saenger, Principles of Nucleic Acid Structure, Springer-Verlag ed., 1984). As such, chemically modified nucleotides present in the siNA molecules of the invention, preferably in the antisense strand of the siNA molecules of the invention, but also optionally in the sense and/or both antisense and sense strands, are resistant to nuclease degradation while at the same time maintaining the capacity to mediate RNAi. Non-limiting examples of nucleotides having a northern configuration include locked nucleic acid (LNA) nucleotides (e.g., 2′-O, 4′-C-methylene-(D-ribofuranosyl) nucleotides); 2′-methoxyethoxy (MOE) nucleotides; 2′-methyl-thio-ethyl, 2′-deoxy-2′-fluoro nucleotides, 2′-deoxy-2′-chloro nucleotides, 2′-azido nucleotides, and 2′-O-methyl nucleotides.

[0097] In one embodiment, the invention features a chemically-modified short interfering nucleic acid molecule (siNA) capable of mediating RNA interference (RNAi) against a MAP kinase inside a cell or reconstituted in vitro system, wherein the chemical modification comprises a conjugate covalently attached to the chemically-modified siNA molecule. In another embodiment, the conjugate is covalently attached to the chemically-modified siNA molecule via a biodegradable linker. In one embodiment, the conjugate molecule is attached at the 3′-end of either the sense strand, the antisense strand, or both strands of the chemically-modified siNA molecule. In another embodiment, the conjugate molecule is attached at the 5′-end of either the sense strand, the antisense strand, or both strands of the chemically-modified siNA molecule. In yet another embodiment, the conjugate molecule is attached both the 3′-end and 5′-end of either the sense strand, the antisense strand, or both strands of the chemically-modified siNA molecule, or any combination thereof. In one embodiment, a conjugate molecule of the invention comprises a molecule that facilitates delivery of a chemically-modified siNA molecule into a biological system, such as a cell. In another embodiment, the conjugate molecule attached to the chemically-modified siNA molecule is a polyethylene glycol, human serum albumin, or a ligand for a cellular receptor that can mediate cellular uptake. Examples of specific conjugate molecules contemplated by the instant invention that can be attached to chemically-modified siNA molecules are described in Vargeese et al., U.S. Ser. No. 10/201,394, incorporated by reference herein. The type of conjugates used and the extent of conjugation of siNA molecules of the invention can be evaluated for improved pharmacokinetic profiles, bioavailability, and/or stability of siNA constructs while at the same time maintaining the ability of the siNA to mediate RNAi activity. As such, one skilled in the art can screen siNA constructs that are modified with various conjugates to determine whether the siNA conjugate complex possesses improved properties while maintaining the ability to mediate RNAi, for example, in animal models as are generally known in the art.

[0098] In one embodiment, the invention features a short interfering nucleic acid (siNA) molecule of the invention, wherein the siNA further comprises a nucleotide, non-nucleotide, or mixed nucleotide/non-nucleotide linker that joins the sense region of the siNA to the antisense region of the siNA. In one embodiment, a nucleotide linker of the invention can be a linker of ≧2 nucleotides in length, for example 3, 4, 5, 6, 7, 8, 9, or 10 nucleotides in length. In another embodiment, the nucleotide linker can be a nucleic acid aptamer. By “aptamer” or “nucleic acid aptamer” as used herein is meant a nucleic acid molecule that binds specifically to a target molecule wherein the nucleic acid molecule has sequence that comprises a sequence recognized by the target molecule in its natural setting. Alternately, an aptamer can be a nucleic acid molecule that binds to a target molecule where the target molecule does not naturally bind to a nucleic acid. The target molecule can be any molecule of interest. For example, the aptamer can be used to bind to a ligand-binding domain of a protein, thereby preventing interaction of the naturally occurring ligand with the protein. This is a non-limiting example and those in the art will recognize that other embodiments can be readily generated using techniques generally known in the art. (See, for example, Gold et al., 1995, Annu. Rev. Biochem., 64, 763; Brody and Gold, 2000, J. Biotechnol., 74, 5; Sunday, 2000, Curr. Opin. Mol. Ther., 2, 100; Kusser, 2000, J. Biotechnol., 74, 27; Hermann and Patel, 2000, Science, 287, 820; and Jayasena, 1999, Clinical Chemistry, 45, 1628.)

[0099] In yet another embodiment, a non-nucleotide linker of the invention comprises abasic nucleotide, polyether, polyamine, polyamide, peptide, carbohydrate, lipid, polyhydrocarbon, or other polymeric compounds (e.g. polyethylene glycols such as those having between 2 and 100 ethylene glycol units). Specific examples include those described by Seela and Kaiser, Nucleic Acids Res. 1990, 18:6353 and Nucleic Acids Res. 1987, 15:3113; Cload and Schepartz, J. Am. Chem. Soc. 1991, 113:6324; Richardson and Schepartz, J. Am. Chem. Soc. 1991, 113:5109; Ma et al., Nucleic Acids Res. 1993, 21:2585 and Biochemistry 1993, 32:1751; Durand et al., Nucleic Acids Res. 1990, 18:6353; McCurdy et al., Nucleosides & Nucleotides 1991, 10:287; Jschke et al., Tetrahedron Lett. 1993, 34:301; Ono et al., Biochemistry 1991, 30:9914; Arnold et al., International Publication No. WO 89/02439; Usman et al., International Publication No. WO 95/06731; Dudycz et al., International Publication No. WO 95/11910 and Ferentz and Verdine, J. Am. Chem. Soc. 1991, 113:4000, all hereby incorporated by reference herein. A “non-nucleotide” further means any group or compound that can be incorporated into a nucleic acid chain in the place of one or more nucleotide units, including either sugar and/or phosphate substitutions, and allows the remaining bases to exhibit their enzymatic activity. The group or compound can be abasic in that it does not contain a commonly recognized nucleotide base, such as adenosine, guanine, cytosine, uracil or thymine, for example at the C1 position of the sugar.

[0100] In one embodiment, the invention features a short interfering nucleic acid (siNA) molecule capable of mediating RNA interference (RNAi) inside a cell or reconstituted in vitro system, wherein one or both strands of the siNA molecule that are assembled from two separate oligonucleotides do not comprise any ribonucleotides. For example, a siNA molecule can be assembled from a single oligonucleotide where the sense and antisense regions of the siNA comprise separate oligonucleotides that do not have any ribonucleotides (e.g., nucleotides having a 2′-OH group) present in the oligonucleotides. In another example, a siNA molecule can be assembled from a single oligonucleotide where the sense and antisense regions of the siNA are linked or circularized by a nucleotide or non-nucleotide linker as described herein, wherein the oligonucleotide does not have any ribonucleotides (e.g., nucleotides having a 2′-OH group) present in the oligonucleotide. Applicant has surprisingly found that the presence of ribonucleotides (e.g., nucleotides having a 2′-hydroxyl group) within the siNA molecule is not required or essential to support RNAi activity. As such, in one embodiment, all positions within the siNA can include chemically modified nucleotides and/or non-nucleotides such as nucleotides and or non-nucleotides having Formula I, II, III, IV, V, VI, or VII or any combination thereof to the extent that the ability of the siNA molecule to support RNAi activity in a cell is maintained.

[0101] In one embodiment, a siNA molecule of the invention is a single stranded siNA molecule that mediates RNAi activity in a cell or reconstituted in vitro system, wherein the siNA molecule comprises a single stranded polynucleotide having complementarity to a target nucleic acid sequence. In another embodiment, the single stranded siNA molecule of the invention comprises a 5′-terminal phosphate group. In another embodiment, the single stranded siNA molecule of the invention comprises a 5′-terminal phosphate group and a 3′-terminal phosphate group (e.g., a 2′,3′-cyclic phosphate). In another embodiment, the single stranded siNA molecule of the invention comprises about 19 to about 29 nucleotides. In yet another embodiment, the single stranded siNA molecule of the invention comprises one or more chemically modified nucleotides or non-nucleotides described herein. For example, all the positions within the siNA molecule can include chemically-modified nucleotides such as nucleotides having any of Formulae I-VII, or any combination thereof to the extent that the ability of the siNA molecule to support RNAi activity in a cell is maintained.

[0102] In one embodiment, a siNA molecule of the invention is a single stranded siNA molecule that mediates RNAi activity in a cell or reconstituted in vitro system, wherein the siNA molecule comprises a single stranded polynucleotide having complementarity to a target nucleic acid sequence, and wherein one or more pyrimidine nucleotides present in the siNA are 2′-deoxy-2′-fluoro pyrimidine nucleotides (e.g., wherein all pyrimidine nucleotides are 2′-deoxy-2′-fluoro pyrimidine nucleotides or alternately a plurality of pyrimidine nucleotides are 2′-deoxy-2′-fluoro pyrimidine nucleotides), and wherein any purine nucleotides present in the antisense region are 2′-O-methyl purine nucleotides (e.g., wherein all purine nucleotides are 2′-O-methyl purine nucleotides or alternately a plurality of purine nucleotides are 2′-O-methyl purine nucleotides), and a terminal cap modification, such as any modification described herein or shown in FIG. 10, that is optionally present at the 3′-end, the 5′-end, or both of the 3′ and 5′-ends of the antisense sequence, the siNA optionally further comprising about 1 to about 4 (e.g., about 1, 2, 3, or 4) terminal 2′-deoxynucleotides at the 3′-end of the siNA molecule, wherein the terminal nucleotides can further comprise one or more (e.g., 1, 2, 3, or 4) phosphorothioate internucleotide linkages, and wherein the siNA optionally further comprises a terminal phosphate group, such as a 5′-terminal phosphate group.

[0103] In one embodiment, a siNA molecule of the invention is a single stranded siNA molecule that mediates RNAi activity in a cell or reconstituted in vitro system, wherein the siNA molecule comprises a single stranded polynucleotide having complementarity to a target nucleic acid sequence, and wherein one or more pyrimidine nucleotides present in the siNA are 2′-deoxy-2′-fluoro pyrimidine nucleotides (e.g., wherein all pyrimidine nucleotides are 2′-deoxy-2′-fluoro pyrimidine nucleotides or alternately a plurality of pyrimidine nucleotides are 2′-deoxy-2′-fluoro pyrimidine nucleotides), and wherein any purine nucleotides present in the siNA are 2′-O-methyl purine nucleotides (e.g., wherein all purine nucleotides are 2′-O-methyl purine nucleotides or alternately a plurality of purine nucleotides are 2′-O-methyl purine nucleotides), and a terminal cap modification, such as any modification described herein or shown in FIG. 10, that is optionally present at the 3′-end, the 5′-end, or both of the 3′ and 5′-ends of the antisense sequence, the siNA optionally further comprising about 1 to about 4 (e.g., about 1, 2, 3, or 4) terminal 2′-deoxynucleotides at the 3′-end of the siNA molecule, wherein the terminal nucleotides can further comprise one or more (e.g., 1, 2, 3, or 4) phosphorothioate internucleotide linkages, and wherein the siNA optionally further comprises a terminal phosphate group, such as a 5′-terminal phosphate group.

[0104] In one embodiment, a siNA molecule of the invention is a single stranded siNA molecule that mediates RNAi activity in a cell or reconstituted in vitro system, wherein the siNA molecule comprises a single stranded polynucleotide having complementarity to a target nucleic acid sequence, and wherein one or more pyrimidine nucleotides present in the siNA are 2′-deoxy-2′-fluoro pyrimidine nucleotides (e.g., wherein all pyrimidine nucleotides are 2′-deoxy-2′-fluoro pyrimidine nucleotides or alternately a plurality of pyrimidine nucleotides are 2′-deoxy-2′-fluoro pyrimidine nucleotides), and wherein any purine nucleotides present in the siNA are 2′-deoxy purine nucleotides (e.g., wherein all purine nucleotides are 2′-deoxy purine nucleotides or alternately a plurality of purine nucleotides are 2′-deoxy purine nucleotides), and a terminal cap modification, such as any modification described herein or shown in FIG. 10, that is optionally present at the 3′-end, the 5′-end, or both of the 3′ and 5′-ends of the antisense sequence, the siNA optionally further comprising about 1 to about 4 (e.g., about 1, 2, 3, or 4) terminal 2′-deoxynucleotides at the 3′-end of the siNA molecule, wherein the terminal nucleotides can further comprise one or more (e.g., 1, 2, 3, or 4) phosphorothioate internucleotide linkages, and wherein the siNA optionally further comprises a terminal phosphate group, such as a 5′-terminal phosphate group.

[0105] In one embodiment, a siNA molecule of the invention is a single stranded siNA molecule that mediates RNAi activity in a cell or reconstituted in vitro system, wherein the siNA molecule comprises a single stranded polynucleotide having complementarity to a target nucleic acid sequence, and wherein one or more pyrimidine nucleotides present in the siNA are 2′-deoxy-2′-fluoro pyrimidine nucleotides (e.g., wherein all pyrimidine nucleotides are 2′-deoxy-2′-fluoro pyrimidine nucleotides or alternately a plurality of pyrimidine nucleotides are 2′-deoxy-2′-fluoro pyrimidine nucleotides), and wherein any purine nucleotides present in the siNA are locked nucleic acid (LNA) nucleotides (e.g., wherein all purine nucleotides are LNA nucleotides or alternately a plurality of purine nucleotides are LNA nucleotides), and a terminal cap modification, such as any modification described herein or shown in FIG. 10, that is optionally present at the 3′-end, the 5′-end, or both of the 3′ and 5′-ends of the antisense sequence, the siNA optionally further comprising about 1 to about 4 (e.g., about 1, 2, 3, or 4) terminal 2′-deoxynucleotides at the 3′-end of the siNA molecule, wherein the terminal nucleotides can further comprise one or more (e.g., 1, 2, 3, or 4) phosphorothioate internucleotide linkages, and wherein the siNA optionally further comprises a terminal phosphate group, such as a 5′-terminal phosphate group.

[0106] In one embodiment, a siNA molecule of the invention is a single stranded siNA molecule that mediates RNAi activity in a cell or reconstituted in vitro system, wherein the siNA molecule comprises a single stranded polynucleotide having complementarity to a target nucleic acid sequence, and wherein one or more pyrimidine nucleotides present in the siNA are 2′-deoxy-2′-fluoro pyrimidine nucleotides (e.g., wherein all pyrimidine nucleotides are 2′-deoxy-2′-fluoro pyrimidine nucleotides or alternately a plurality of pyrimidine nucleotides are 2′-deoxy-2′-fluoro pyrimidine nucleotides), and wherein any purine nucleotides present in the siNA are 2′-methoxyethyl purine nucleotides (e.g., wherein all purine nucleotides are 2′-methoxyethyl purine nucleotides or alternately a plurality of purine nucleotides are 2′-methoxyethyl purine nucleotides), and a terminal cap modification, such as any modification described herein or shown in FIG. 10, that is optionally present at the 3′-end, the 5′-end, or both of the 3′ and 5′-ends of the antisense sequence, the siNA optionally further comprising about 1 to about 4 (e.g., about 1, 2, 3, or 4) terminal 2′-deoxynucleotides at the 3′-end of the siNA molecule, wherein the terminal nucleotides can further comprise one or more (e.g., 1, 2, 3, or 4) phosphorothioate internucleotide linkages, and wherein the siNA optionally further comprises a terminal phosphate group, such as a 5′-terminal phosphate group.

[0107] In another embodiment, any modified nucleotides present in the single stranded siNA molecules of the invention comprise modified nucleotides having properties or characteristics similar to naturally occurring ribonucleotides. For example, the invention features siNA molecules including modified nucleotides having a Northern conformation (e.g., Northern pseudorotation cycle, see for example Saenger, Principles of Nucleic Acid Structure, Springer-Verlag ed., 1984). As such, chemically modified nucleotides present in the single stranded siNA molecules of the invention are preferably resistant to nuclease degradation while at the same time maintaining the capacity to mediate RNAi.

[0108] In one embodiment, the invention features a method for modulating the expression of a MAP kinase gene within a cell comprising: (a) synthesizing a siNA molecule of the invention, which can be chemically-modified, wherein one of the siNA strands comprises a sequence complementary to RNA of the MAP kinase gene; and (b) introducing the siNA molecule into a cell under conditions suitable to modulate the expression of the MAP kinase gene in the cell.

[0109] In one embodiment, the invention features a method for modulating the expression of a MAP kinase gene within a cell comprising: (a) synthesizing a siNA molecule of the invention, which can be chemically-modified, wherein one of the siNA strands comprises a sequence complementary to RNA of the MAP kinase gene and wherein the sense strand sequence of the siNA comprises a sequence identical to the sequence of the target RNA; and (b) introducing the siNA molecule into a cell under conditions suitable to modulate the expression of the MAP kinase gene in the cell.

[0110] In another embodiment, the invention features a method for modulating the expression of more than one MAP kinase gene within a cell comprising: (a) synthesizing siNA molecules of the invention, which can be chemically-modified, wherein one of the siNA strands comprises a sequence complementary to RNA of the MAP kinase genes; and (b) introducing the siNA molecules into a cell under conditions suitable to modulate the expression of the MAP kinase genes in the cell.

[0111] In another embodiment, the invention features a method for modulating the expression of more than one MAP kinase gene within a cell comprising: (a) synthesizing a siNA molecule of the invention, which can be chemically-modified, wherein one of the siNA strands comprises a sequence complementary to RNA of the MAP kinase gene and wherein the sense strand sequence of the siNA comprises a sequence identical to the sequence of the target RNA; and (b) introducing the siNA molecules into a cell under conditions suitable to modulate the expression of the MAP kinase genes in the cell.

[0112] In one embodiment, siNA molecules of the invention are used as reagents in ex vivo applications. For example, siNA reagents are introduced into tissue or cells that are transplanted into a subject for therapeutic effect. The cells and/or tissue can be derived from an organism or subject that later receives the explant, or can be derived from another organism or subject prior to transplantation. The siNA molecules can be used to modulate the expression of one or more genes in the cells or tissue, such that the cells or tissue obtain a desired phenotype or are able to perform a function when transplanted in vivo. In one embodiment, certain target cells from a patient are extracted. These extracted cells are contacted with siNAs targeting a specific nucleotide sequence within the cells under conditions suitable for uptake of the siNAs by these cells (e.g. using delivery reagents such as cationic lipids, liposomes and the like or using techniques such as electroporation to facilitate the delivery of siNAs into cells). The cells are then reintroduced back into the same patient or other patients. In one embodiment, the invention features a method of modulating the expression of a MAP kinase gene in a tissue explant comprising: (a) synthesizing a siNA molecule of the invention, which can be chemically-modified, wherein one of the siNA strands comprises a sequence complementary to RNA of the MAP kinase gene; and (b) introducing the siNA molecule into a cell of the tissue explant derived from a particular organism under conditions suitable to modulate the expression of the MAP kinase gene in the tissue explant. In another embodiment, the method further comprises introducing the tissue explant back into the organism the tissue was derived from or into another organism under conditions suitable to modulate the expression of the MAP kinase gene in that organism.

[0113] In one embodiment, the invention features a method of modulating the expression of a MAP kinase gene in a tissue explant comprising: (a) synthesizing a siNA molecule of the invention, which can be chemically-modified, wherein one of the siNA strands comprises a sequence complementary to RNA of the MAP kinase gene and wherein the sense strand sequence of the siNA comprises a sequence identical to the sequence of the target RNA; and (b) introducing the siNA molecule into a cell of the tissue explant derived from a particular organism under conditions suitable to modulate the expression of the MAP kinase gene in the tissue explant. In another embodiment, the method further comprises introducing the tissue explant back into the organism the tissue was derived from or into another organism under conditions suitable to modulate the expression of the MAP kinase gene in that organism.

[0114] In another embodiment, the invention features a method of modulating the expression of more than one MAP kinase gene in a tissue explant comprising: (a) synthesizing siNA molecules of the invention, which can be chemically-modified, wherein one of the siNA strands comprises a sequence complementary to RNA of the MAP kinase genes; and (b) introducing the siNA molecules into a cell of the tissue explant derived from a particular organism under conditions suitable to modulate the expression of the MAP kinase genes in the tissue explant. In another embodiment, the method further comprises introducing the tissue explant back into the organism the tissue was derived from or into another organism under conditions suitable to modulate the expression of the MAP kinase genes in that organism.

[0115] In one embodiment, the invention features a method of modulating the expression of a MAP kinase gene in an organism comprising: (a) synthesizing a siNA molecule of the invention, which can be chemically-modified, wherein one of the siNA strands comprises a sequence complementary to RNA of the MAP kinase gene; and (b) introducing the siNA molecule into the organism under conditions suitable to modulate the expression of the MAP kinase gene in the organism.

[0116] In another embodiment, the invention features a method of modulating the expression of more than one MAP kinase gene in an organism comprising: (a) synthesizing siNA molecules of the invention, which can be chemically-modified, wherein one of the siNA strands comprises a sequence complementary to RNA of the MAP kinase genes; and (b) introducing the siNA molecules into the organism under conditions suitable to modulate the expression of the MAP kinase genes in the organism.

[0117] In one embodiment, the invention features a method for modulating the expression of a MAP kinase gene within a cell comprising: (a) synthesizing a siNA molecule of the invention, which can be chemically-modified, wherein the siNA comprises a single stranded sequence having complementarity to RNA of the MAP kinase gene; and (b) introducing the siNA molecule into a cell under conditions suitable to modulate the expression of the MAP kinase gene in the cell.

[0118] In another embodiment, the invention features a method for modulating the expression of more than one MAP kinase gene within a cell comprising: (a) synthesizing siNA molecules of the invention, which can be chemically-modified, wherein the siNA comprises a single stranded sequence having complementarity to RNA of the MAP kinase gene; and (b) contacting the siNA molecule with a cell in vitro or in vivo under conditions suitable to modulate the expression of the MAP kinase genes in the cell.

[0119] In one embodiment, the invention features a method of modulating the expression of a MAP kinase gene in a tissue explant comprising: (a) synthesizing a siNA molecule of the invention, which can be chemically-modified, wherein the siNA comprises a single stranded sequence having complementarity to RNA of the MAP kinase gene; and (b) contacting the siNA molecule with a cell of the tissue explant derived from a particular organism under conditions suitable to modulate the expression of the MAP kinase gene in the tissue explant. In another embodiment, the method further comprises introducing the tissue explant back into the organism the tissue was derived from or into another organism under conditions suitable to modulate the expression of the MAP kinase gene in that organism.

[0120] In another embodiment, the invention features a method of modulating the expression of more than one MAP kinase gene in a tissue explant comprising: (a) synthesizing siNA molecules of the invention, which can be chemically-modified, wherein the siNA comprises a single stranded sequence having complementarity to RNA of the MAP kinase gene; and (b) introducing the siNA molecules into a cell of the tissue explant derived from a particular organism under conditions suitable to modulate the expression of the MAP kinase genes in the tissue explant. In another embodiment, the method further comprises introducing the tissue explant back into the organism the tissue was derived from or into another organism under conditions suitable to modulate the expression of the MAP kinase genes in that organism.

[0121] In one embodiment, the invention features a method of modulating the expression of a MAP kinase gene in an organism comprising: (a) synthesizing a siNA molecule of the invention, which can be chemically-modified, wherein the siNA comprises a single stranded sequence having complementarity to RNA of the MAP kinase gene; and (b) introducing the siNA molecule into the organism under conditions suitable to modulate the expression of the MAP kinase gene in the organism.

[0122] In another embodiment, the invention features a method of modulating the expression of more than one MAP kinase gene in an organism comprising: (a) synthesizing siNA molecules of the invention, which can be chemically-modified, wherein the siNA comprises a single stranded sequence having complementarity to RNA of the MAP kinase gene; and (b) introducing the siNA molecules into the organism under conditions suitable to modulate the expression of the MAP kinase genes in the organism.

[0123] In one embodiment, the invention features a method of modulating the expression of a MAP kinase gene in an organism comprising contacting the organism with a siNA molecule of the invention under conditions suitable to modulate the expression of the MAP kinase gene in the organism.

[0124] In another embodiment, the invention features a method of modulating the expression of more than one MAP kinase gene in an organism comprising contacting the organism with one or more siNA molecules of the invention under conditions suitable to modulate the expression of the MAP kinase genes in the organism.

[0125] The siNA molecules of the invention can be designed to down-regulate or inhibit target (MAP kinase) gene expression through RNAi targeting of a variety of RNA molecules. In one embodiment, the siNA molecules of the invention are used to target various RNAs corresponding to a target gene. Non-limiting examples of such RNAs include messenger RNA (mRNA), alternate RNA splice variants of target gene(s), post-transcriptionally modified RNA of target gene(s), pre-mRNA of target gene(s), and/or RNA templates. If alternate splicing produces a family of transcripts that are distinguished by usage of appropriate exons, the instant invention can be used to inhibit gene expression through the appropriate exons to specifically inhibit or to distinguish among the functions of gene family members. For example, a protein that contains an alternatively spliced transmembrane domain can be expressed in both membrane bound and secreted forms. Use of the invention to target the exon containing the transmembrane domain can be used to determine the functional consequences of pharmaceutical targeting of membrane bound as opposed to the secreted form of the protein. Non-limiting examples of applications of the invention relating to targeting these RNA molecules include therapeutic pharmaceutical applications, pharmaceutical discovery applications, molecular diagnostic and gene function applications, and gene mapping, for example using single nucleotide polymorphism mapping with siNA molecules of the invention. Such applications can be implemented using known gene sequences or from partial sequences available from an expressed sequence tag (EST).

[0126] In another embodiment, the siNA molecules of the invention are used to target conserved sequences corresponding to a gene family or gene families such as MAP kinase family genes. As such, siNA molecules targeting multiple MAP kinase targets can provide increased therapeutic effect. In addition, siNA can be used to characterize pathways of gene function in a variety of applications. For example, the present invention can be used to inhibit the activity of target gene(s) in a pathway to determine the function of uncharacterized gene(s) in gene function analysis, mRNA function analysis, or translational analysis. The invention can be used to determine potential target gene pathways involved in various diseases and conditions toward pharmaceutical development. The invention can be used to understand pathways of gene expression involved in, for example, the progression and/or maintenance of cancer.

[0127] In one embodiment, siNA molecule(s) and/or methods of the invention are used to down-regulate the expression of gene(s) that encode RNA referred to by Genbank Accession, for example MAP kinase genes encoding RNA sequence(s) referred to herein by Genbank Accession number, for example, Genbank Accession Nos. shown in Table I.

[0128] In one embodiment, the invention features a method comprising: (a) generating a library of siNA constructs having a predetermined complexity; and (b) assaying the siNA constructs of (a) above, under conditions suitable to determine RNAi target sites within the target RNA sequence. In one embodiment, the siNA molecules of (a) have strands of a fixed length, for example, about 23 nucleotides in length. In another embodiment, the siNA molecules of (a) are of differing length, for example having strands of about 19 to about 25 (e.g., about 19, 20, 21, 22, 23, 24, or 25) nucleotides in length. In one embodiment, the assay can comprise a reconstituted in vitro siNA assay as described herein. In another embodiment, the assay can comprise a cell culture system in which target RNA is expressed. In another embodiment, fragments of target RNA are analyzed for detectable levels of cleavage, for example by gel electrophoresis, northern blot analysis, or RNAse protection assays, to determine the most suitable target site(s) within the target RNA sequence. The target RNA sequence can be obtained as is known in the art, for example, by cloning and/or transcription for in vitro systems, and by cellular expression in in vivo systems.

[0129] In one embodiment, the invention features a method comprising: (a) generating a randomized library of siNA constructs having a predetermined complexity, such as of 4N, where N represents the number of base paired nucleotides in each of the siNA construct strands (eg. for a siNA construct having 21 nucleotide sense and antisense strands with 19 base pairs, the complexity would be 419); and (b) assaying the siNA constructs of (a) above, under conditions suitable to determine RNAi target sites within the target MAP kinase RNA sequence. In another embodiment, the siNA molecules of (a) have strands of a fixed length, for example about 23 nucleotides in length. In yet another embodiment, the siNA molecules of (a) are of differing length, for example having strands of about 19 to about 25 (e.g., about 19, 20, 21, 22, 23, 24, or 25) nucleotides in length. In one embodiment, the assay can comprise a reconstituted in vitro siNA assay as described in Example 7 herein. In another embodiment, the assay can comprise a cell culture system in which target RNA is expressed. In another embodiment, fragments of MAP kinase RNA are analyzed for detectable levels of cleavage, for example by gel electrophoresis, northern blot analysis, or RNAse protection assays, to determine the most suitable target site(s) within the target MAP kinase RNA sequence. The target MAP kinase RNA sequence can be obtained as is known in the art, for example, by cloning and/or transcription for in vitro systems, and by cellular expression in in vivo systems.

[0130] In another embodiment, the invention features a method comprising: (a) analyzing the sequence of a RNA target encoded by a target gene; (b) synthesizing one or more sets of siNA molecules having sequence complementary to one or more regions of the RNA of (a); and (c) assaying the siNA molecules of (b) under conditions suitable to determine RNAi targets within the target RNA sequence. In one embodiment, the siNA molecules of (b) have strands of a fixed length, for example about 23 nucleotides in length. In another embodiment, the siNA molecules of (b) are of differing length, for example having strands of about 19 to about 25 (e.g., about 19, 20, 21, 22, 23, 24, or 25) nucleotides in length. In one embodiment, the assay can comprise a reconstituted in vitro siNA assay as described herein. In another embodiment, the assay can comprise a cell culture system in which target RNA is expressed. Fragments of target RNA are analyzed for detectable levels of cleavage, for example by gel electrophoresis, northern blot analysis, or RNAse protection assays, to determine the most suitable target site(s) within the target RNA sequence. The target RNA sequence can be obtained as is known in the art, for example, by cloning and/or transcription for in vitro systems, and by expression in in vivo systems.

[0131] By “target site” is meant a sequence within a target RNA that is “targeted” for cleavage mediated by a siNA construct which contains sequences within its antisense region that are complementary to the target sequence.

[0132] By “detectable level of cleavage” is meant cleavage of target RNA (and formation of cleaved product RNAs) to an extent sufficient to discern cleavage products above the background of RNAs produced by random degradation of the target RNA. Production of cleavage products from 1-5% of the target RNA is sufficient to detect above the background for most methods of detection.

[0133] In one embodiment, the invention features a composition comprising a siNA molecule of the invention, which can be chemically-modified, in a pharmaceutically acceptable carrier or diluent. In another embodiment, the invention features a pharmaceutical composition comprising siNA molecules of the invention, which can be chemically-modified, targeting one or more genes in a pharmaceutically acceptable carrier or diluent. In another embodiment, the invention features a method for diagnosing a disease or condition in a subject comprising administering to the subject a composition of the invention under conditions suitable for the diagnosis of the disease or condition in the subject. In another embodiment, the invention features a method for treating or preventing a disease or condition in a subject, comprising administering to the subject a composition of the invention under conditions suitable for the treatment or prevention of the disease or condition in the subject, alone or in conjunction with one or more other therapeutic compounds. In yet another embodiment, the invention features a method for reducing or preventing tissue rejection in a subject comprising administering to the subject a composition of the invention under conditions suitable for the reduction or prevention of tissue rejection in the subject.

[0134] In another embodiment, the invention features a method for validating a MAP kinase gene target comprising: (a) synthesizing a siNA molecule of the invention, which can be chemically-modified, wherein one of the siNA strands includes a sequence complementary to RNA of a MAP kinase target gene; (b) introducing the siNA molecule into a cell, tissue, or organism under conditions suitable for modulating expression of the MAP kinase target gene in the cell, tissue, or organism; and (c) determining the function of the gene by assaying for any phenotypic change in the cell, tissue, or organism.

[0135] In another embodiment, the invention features a method for validating a MAP kinase target comprising: (a) synthesizing a siNA molecule of the invention, which can be chemically-modified, wherein one of the siNA strands includes a sequence complementary to RNA of a MAP kinase target gene; (b) introducing the siNA molecule into a biological system under conditions suitable for modulating expression of the MAP kinase target gene in the biological system; and (c) determining the function of the gene by assaying for any phenotypic change in the biological system.

[0136] By “biological system” is meant, material, in a purified or unpurified form, from biological sources, including but not limited to human, animal, plant, insect, bacterial, viral or other sources, wherein the system comprises the components required for RNAi activity. The term “biological system” includes, for example, a cell, tissue, or organism, or extract thereof. The term biological system also includes reconstituted RNAi systems that can be used in an in vitro setting.

[0137] By “phenotypic change” is meant any detectable change to a cell that occurs in response to contact or treatment with a nucleic acid molecule of the invention (e.g., siNA). Such detectable changes include, but are not limited to, changes in shape, size, proliferation, motility, protein expression or RNA expression or other physical or chemical changes as can be assayed by methods known in the art. The detectable change can also include expression of reporter genes/molecules such as Green Florescent Protein (GFP) or various tags that are used to identify an expressed protein or any other cellular component that can be assayed.

[0138] In one embodiment, the invention features a kit containing a siNA molecule of the invention, which can be chemically-modified, that can be used to modulate the expression of a MAP kinase target gene in a biological system, including, for example, in a cell, tissue, or organism. In another embodiment, the invention features a kit containing more than one siNA molecule of the invention, which can be chemically-modified, that can be used to modulate the expression of more than one MAP kinase target gene in a biological system, including, for example, in a cell, tissue, or organism.

[0139] In one embodiment, the invention features a cell containing one or more siNA molecules of the invention, which can be chemically-modified. In another embodiment, the cell containing a siNA molecule of the invention is a mammalian cell. In yet another embodiment, the cell containing a siNA molecule of the invention is a human cell.

[0140] In one embodiment, the synthesis of a siNA molecule of the invention, which can be chemically-modified, comprises: (a) synthesis of two complementary strands of the siNA molecule; (b) annealing the two complementary strands together under conditions suitable to obtain a double-stranded siNA molecule. In another embodiment, synthesis of the two complementary strands of the siNA molecule is by solid phase oligonucleotide synthesis. In yet another embodiment, synthesis of the two complementary strands of the siNA molecule is by solid phase tandem oligonucleotide synthesis.

[0141] In one embodiment, the invention features a method for synthesizing a siNA duplex molecule comprising: (a) synthesizing a first oligonucleotide sequence strand of the siNA molecule, wherein the first oligonucleotide sequence strand comprises a cleavable linker molecule that can be used as a scaffold for the synthesis of the second oligonucleotide sequence strand of the siNA; (b) synthesizing the second oligonucleotide sequence strand of siNA on the scaffold of the first oligonucleotide sequence strand, wherein the second oligonucleotide sequence strand further comprises a chemical moiety than can be used to purify the siNA duplex; (c) cleaving the linker molecule of (a) under conditions suitable for the two siNA oligonucleotide strands to hybridize and form a stable duplex; and (d) purifying the siNA duplex utilizing the chemical moiety of the second oligonucleotide sequence strand. In one embodiment, cleavage of the linker molecule in (c) above takes place during deprotection of the oligonucleotide, for example, under hydrolysis conditions using an alkylamine base such as methylamine. In one embodiment, the method of synthesis comprises solid phase synthesis on a solid support such as controlled pore glass (CPG) or polystyrene, wherein the first sequence of (a) is synthesized on a cleavable linker, such as a succinyl linker, using the solid support as a scaffold. The cleavable linker in (a) used as a scaffold for synthesizing the second strand can comprise similar reactivity as the solid support derivatized linker, such that cleavage of the solid support derivatized linker and the cleavable linker of (a) takes place concomitantly. In another embodiment, the chemical moiety of (b) that can be used to isolate the attached oligonucleotide sequence comprises a trityl group, for example a dimethoxytrityl group, which can be employed in a trityl-on synthesis strategy as described herein. In yet another embodiment, the chemical moiety, such as a dimethoxytrityl group, is removed during purification, for example, using acidic conditions.

[0142] In a further embodiment, the method for siNA synthesis is a solution phase synthesis or hybrid phase synthesis wherein both strands of the siNA duplex are synthesized in tandem using a cleavable linker attached to the first sequence which acts a scaffold for synthesis of the second sequence. Cleavage of the linker under conditions suitable for hybridization of the separate siNA sequence strands results in formation of the double-stranded siNA molecule.

[0143] In another embodiment, the invention features a method for synthesizing a siNA duplex molecule comprising: (a) synthesizing one oligonucleotide sequence strand of the siNA molecule, wherein the sequence comprises a cleavable linker molecule that can be used as a scaffold for the synthesis of another oligonucleotide sequence; (b) synthesizing a second oligonucleotide sequence having complementarity to the first sequence strand on the scaffold of (a), wherein the second sequence comprises the other strand of the double-stranded siNA molecule and wherein the second sequence further comprises a chemical moiety than can be used to isolate the attached oligonucleotide sequence; (c) purifying the product of (b) utilizing the chemical moiety of the second oligonucleotide sequence strand under conditions suitable for isolating the full-length sequence comprising both siNA oligonucleotide strands connected by the cleavable linker and under conditions suitable for the two siNA oligonucleotide strands to hybridize and form a stable duplex. In one embodiment, cleavage of the linker molecule in (c) above takes place during deprotection of the oligonucleotide, for example under hydrolysis conditions. In another embodiment, cleavage of the linker molecule in (c) above takes place after deprotection of the oligonucleotide. In another embodiment, the method of synthesis comprises solid phase synthesis on a solid support such as controlled pore glass (CPG) or polystyrene, wherein the first sequence of (a) is synthesized on a cleavable linker, such as a succinyl linker, using the solid support as a scaffold. The cleavable linker in (a) used as a scaffold for synthesizing the second strand can comprise similar reactivity or differing reactivity as the solid support derivatized linker, such that cleavage of the solid support derivatized linker and the cleavable linker of (a) takes place either concomitantly or sequentially. In one embodiment, the chemical moiety of (b) that can be used to isolate the attached oligonucleotide sequence comprises a trityl group, for example a dimethoxytrityl group.

[0144] In another embodiment, the invention features a method for making a double-stranded siNA molecule in a single synthetic process comprising: (a) synthesizing an oligonucleotide having a first and a second sequence, wherein the first sequence is complementary to the second sequence, and the first oligonucleotide sequence is linked to the second sequence via a cleavable linker, and wherein a terminal 5′-protecting group, for example, a 5′-O-dimethoxytrityl group (5′-O-DMT) remains on the oligonucleotide having the second sequence; (b) deprotecting the oligonucleotide whereby the deprotection results in the cleavage of the linker joining the two oligonucleotide sequences; and (c) purifying the product of (b) under conditions suitable for isolating the double-stranded siNA molecule, for example using a trityl-on synthesis strategy as described herein.

[0145] In another embodiment, the method of synthesis of siNA molecules of the invention comprises the teachings of Scaringe et al., U.S. Pat. Nos. 5,889,136; 6,008,400; and 6,111,086, incorporated by reference herein in their entirety.

[0146] In one embodiment, the invention features siNA constructs that mediate RNAi against a MAP kinase, wherein the siNA construct comprises one or more chemical modifications, for example, one or more chemical modifications having any of Formulae I-VII or any combination thereof that increases the nuclease resistance of the siNA construct.

[0147] In another embodiment, the invention features a method for generating siNA molecules with increased nuclease resistance comprising (a) introducing nucleotides having any of Formula I-VII or any combination thereof into a siNA molecule, and (b) assaying the siNA molecule of step (a) under conditions suitable for isolating siNA molecules having increased nuclease resistance.

[0148] In one embodiment, the invention features siNA constructs that mediate RNAi against a MAP kinase, wherein the siNA construct comprises one or more chemical modifications described herein that modulates the binding affinity between the sense and antisense strands of the siNA construct.

[0149] In another embodiment, the invention features a method for generating siNA molecules with increased binding affinity between the sense and antisense strands of the siNA molecule comprising (a) introducing nucleotides having any of Formula I-VII or any combination thereof into a siNA molecule, and (b) assaying the siNA molecule of step (a) under conditions suitable for isolating siNA molecules having increased binding affinity between the sense and antisense strands of the siNA molecule.

[0150] In one embodiment, the invention features siNA constructs that mediate RNAi against a MAP kinase, wherein the siNA construct comprises one or more chemical modifications described herein that modulates the binding affinity between the antisense strand of the siNA construct and a complementary target RNA sequence within a cell.

[0151] In one embodiment, the invention features siNA constructs that mediate RNAi against a MAP kinase, wherein the siNA construct comprises one or more chemical modifications described herein that modulates the binding affinity between the antisense strand of the siNA construct and a complementary target DNA sequence within a cell.

[0152] In another embodiment, the invention features a method for generating siNA molecules with increased binding affinity between the antisense strand of the siNA molecule and a complementary target RNA sequence comprising (a) introducing nucleotides having any of Formula I-VII or any combination thereof into a siNA molecule, and (b) assaying the siNA molecule of step (a) under conditions suitable for isolating siNA molecules having increased binding affinity between the antisense strand of the siNA molecule and a complementary target RNA sequence.

[0153] In another embodiment, the invention features a method for generating siNA molecules with increased binding affinity between the antisense strand of the siNA molecule and a complementary target DNA sequence comprising (a) introducing nucleotides having any of Formula I-VII or any combination thereof into a siNA molecule, and (b) assaying the siNA molecule of step (a) under conditions suitable for isolating siNA molecules having increased binding affinity between the antisense strand of the siNA molecule and a complementary target DNA sequence.

[0154] In one embodiment, the invention features siNA constructs that mediate RNAi against a MAP kinase, wherein the siNA construct comprises one or more chemical modifications described herein that modulate the polymerase activity of a cellular polymerase capable of generating additional endogenous siNA molecules having sequence homology to the chemically-modified siNA construct.

[0155] In another embodiment, the invention features a method for generating siNA molecules capable of mediating increased polymerase activity of a cellular polymerase capable of generating additional endogenous siNA molecules having sequence homology to a chemically-modified siNA molecule comprising (a) introducing nucleotides having any of Formula I-VII or any combination thereof into a siNA molecule, and (b) assaying the siNA molecule of step (a) under conditions suitable for isolating siNA molecules capable of mediating increased polymerase activity of a cellular polymerase capable of generating additional endogenous siNA molecules having sequence homology to the chemically-modified siNA molecule.

[0156] In one embodiment, the invention features chemically-modified siNA constructs that mediate RNAi against a MAP kinase in a cell, wherein the chemical modifications do not significantly effect the interaction of siNA with a target RNA molecule, DNA molecule and/or proteins or other factors that are essential for RNAi in a manner that would decrease the efficacy of RNAi mediated by such siNA constructs.

[0157] In another embodiment, the invention features a method for generating siNA molecules with improved RNAi activity against MAP kinase comprising (a) introducing nucleotides having any of Formula I-VII or any combination thereof into a siNA molecule, and (b) assaying the siNA molecule of step (a) under conditions suitable for isolating siNA molecules having improved RNAi activity.

[0158] In yet another embodiment, the invention features a method for generating siNA molecules with improved RNAi activity against a MAP kinase target RNA comprising (a) introducing nucleotides having any of Formula I-VII or any combination thereof into a siNA molecule, and (b) assaying the siNA molecule of step (a) under conditions suitable for isolating siNA molecules having improved RNAi activity against the target RNA.

[0159] In yet another embodiment, the invention features a method for generating siNA molecules with improved RNAi activity against a MAP kinase target DNA comprising (a) introducing nucleotides having any of Formula I-VII or any combination thereof into a siNA molecule, and (b) assaying the siNA molecule of step (a) under conditions suitable for isolating siNA molecules having improved RNAi activity against the target DNA.

[0160] In one embodiment, the invention features siNA constructs that mediate RNAi against a MAP kinase, wherein the siNA construct comprises one or more chemical modifications described herein that modulates the cellular uptake of the siNA construct.

[0161] In another embodiment, the invention features a method for generating siNA molecules against MAP kinase with improved cellular uptake comprising (a) introducing nucleotides having any of Formula I-VII or any combination thereof into a siNA molecule, and (b) assaying the siNA molecule of step (a) under conditions suitable for isolating siNA molecules having improved cellular uptake.

[0162] In one embodiment, the invention features siNA constructs that mediate RNAi against a MAP kinase, wherein the siNA construct comprises one or more chemical modifications described herein that increases the bioavailability of the siNA construct, for example, by attaching polymeric conjugates such as polyethyleneglycol or equivalent conjugates that improve the pharmacokinetics of the siNA construct, or by attaching conjugates that target specific tissue types or cell types in vivo. Non-limiting examples of such conjugates are described in Vargeese et al., U.S. Ser. No. 10/201,394 incorporated by reference herein.

[0163] In one embodiment, the invention features a method for generating siNA molecules of the invention with improved bioavailability comprising (a) introducing a conjugate into the structure of a siNA molecule, and (b) assaying the siNA molecule of step (a) under conditions suitable for isolating siNA molecules having improved bioavailability. Such conjugates can include ligands for cellular receptors, such as peptides derived from naturally occurring protein ligands; protein localization sequences, including cellular ZIP code sequences; antibodies; nucleic acid aptamers; vitamins and other co-factors, such as folate and N-acetylgalactosamine; polymers, such as polyethyleneglycol (PEG); phospholipids; cholesterol; polyamines, such as spermine or spermidine; and others.

[0164] In another embodiment, the invention features a method for generating siNA molecules of the invention with improved bioavailability comprising (a) introducing an excipient formulation to a siNA molecule, and (b) assaying the siNA molecule of step (a) under conditions suitable for isolating siNA molecules having improved bioavailability. Such excipients include polymers such as cyclodextrins, lipids, cationic lipids, polyamines, phospholipids, and others.

[0165] In another embodiment, the invention features a method for generating siNA molecules of the invention with improved bioavailability comprising (a) introducing nucleotides having any of Formulae I-VII or any combination thereof into a siNA molecule, and (b) assaying the siNA molecule of step (a) under conditions suitable for isolating siNA molecules having improved bioavailability.

[0166] In another embodiment, polyethylene glycol (PEG) can be covalently attached to siNA compounds of the present invention. The attached PEG can be any molecular weight, preferably from about 2,000 to about 50,000 daltons (Da).

[0167] The present invention can be used alone or as a component of a kit having at least one of the reagents necessary to carry out the in vitro or in vivo introduction of RNA to test samples and/or subjects. For example, preferred components of the kit include a siNA molecule of the invention and a vehicle that promotes introduction of the siNA into cells of interest as described herein (e.g., using lipids and other methods of transfection known in the art, see for example Beigelman et al, U.S. Pat. No. 6,395,713). The kit can be used for target validation, such as in determining gene function and/or activity, or in drug optimization, and in drug discovery (see for example Usman et al., U.S. Ser. No. 60/402,996). Such a kit can also include instructions to allow a user of the kit to practice the invention.

[0168] The term “short interfering nucleic acid”, “siNA”, “short interfering RNA”, “siRNA”, “short interfering nucleic acid molecule”, “short interfering oligonucleotide molecule”, or “chemically-modified short interfering nucleic acid molecule” as used herein refers to any nucleic acid molecule capable of inhibiting or down regulating gene expression, for example by mediating RNA interference “RNAi” or gene silencing in a sequence-specific manner; see for example Bass, 2001, Nature, 411, 428-429; Elbashir et al., 2001, Nature, 411, 494-498; and Kreutzer et al., International PCT Publication No. WO 00/44895; Zernicka-Goetz et al., International PCT Publication No. WO 01/36646; Fire, International PCT Publication No. WO 99/32619; Plaetinck et al., International PCT Publication No. WO 00/01846; Mello and Fire, International PCT Publication No. WO 01/29058; Deschamps-Depaillette, International PCT Publication No. WO 99/07409; and Li et al., International PCT Publication No. WO 00/44914; Allshire, 2002, Science, 297, 1818-1819; Volpe et al., 2002, Science, 297, 1833-1837; Jenuwein, 2002, Science, 297, 2215-2218; and Hall et al., 2002, Science, 297, 2232-2237; Hutvagner and Zamore, 2002, Science, 297, 2056-60; McManus et al., 2002, RNA, 8, 842-850; Reinhart et al., 2002, Gene & Dev., 16, 1616-1626; and Reinhart & Bartel, 2002, Science, 297, 1831). Non limiting examples of siNA molecules of the invention are shown in FIGS. 4-6, and Tables II, III, and IV herein. For example the siNA can be a double-stranded polynucleotide molecule comprising self-complementary sense and antisense regions, wherein the antisense region comprises nucleotide sequence that is complementary to nucleotide sequence in a target nucleic acid molecule or a portion thereof and the sense region having nucleotide sequence corresponding to the target nucleic acid sequence or a portion thereof. The siNA can be assembled from two separate oligonucleotides, where one strand is the sense strand and the other is the antisense strand, wherein the antisense and sense strands are self-complementary (i.e. each strand comprises nucleotide sequence that is complementary to nucleotide sequence in the other strand; such as where the antisense strand and sense strand form a duplex or double stranded structure, for example wherein the double stranded region is about 19 base pairs); the antisense strand comprises nucleotide sequence that is complementary to nucleotide sequence in a target nucleic acid molecule or a portion thereof and the sense strand comprises nucleotide sequence corresponding to the target nucleic acid sequence or a portion thereof. Alternatively, the siNA is assembled from a single oligonucleotide, where the self-complementary sense and antisense regions of the siNA are linked by means of a nucleic acid based or non-nucleic acid-based linker(s). The siNA can be a polynucleotide with a hairpin secondary structure, having self-complementary sense and antisense regions, wherein the antisense region comprises nucleotide sequence that is complementary to nucleotide sequence in a separate target nucleic acid molecule or a portion thereof and the sense region having nucleotide sequence corresponding to the target nucleic acid sequence or a portion thereof. The siNA can be a circular single-stranded polynucleotide having two or more loop structures and a stem comprising self-complementary sense and antisense regions, wherein the antisense region comprises nucleotide sequence that is complementary to nucleotide sequence in a target nucleic acid molecule or a portion thereof and the sense region having nucleotide sequence corresponding to the target nucleic acid sequence or a portion thereof, and wherein the circular polynucleotide can be processed either in vivo or in vitro to generate an active siNA molecule capable of mediating RNAi. The siNA can also comprise a single stranded polynucleotide having nucleotide sequence complementary to nucleotide sequence in a target nucleic acid molecule or a portion thereof (for example, where such siNA molecule does not require the presence within the siNA molecule of nucleotide sequence corresponding to the target nucleic acid sequence or a portion thereof), wherein the single stranded polynucleotide can further comprise a terminal phosphate group, such as a 5′-phosphate (see for example Martinez et al., 2002, Cell., 110, 563-574 and Schwarz et al., 2002, Molecular Cell, 10, 537-568), or 5′,3′-diphosphate. In certain embodiment, the siNA molecule of the invention comprises separate sense and antisense sequences or regions, wherein the sense and antisense regions are covalently linked by nucleotide or non-nucleotide linkers molecules as is known in the art, or are alternately non-covalently linked by ionic interactions, hydrogen bonding, van der waals interactions, hydrophobic interactions, and/or stacking interactions. In certain embodiments, the siNA molecules of the invention comprise nucleotide sequence that is complementary to nucleotide sequence of a target gene. In another embodiment, the siNA molecule of the invention interacts with nucleotide sequence of a target gene in a manner that causes inhibition of expression of the target gene. As used herein, siNA molecules need not be limited to those molecules containing only RNA, but further encompasses chemically-modified nucleotides and non-nucleotides. In certain embodiments, the short interfering nucleic acid molecules of the invention lack 2′-hydroxy (2′-OH) containing nucleotides. Applicant describes in certain embodiments short interfering nucleic acids that do not require the presence of nucleotides having a 2′-hydroxy group for mediating RNAi and as such, short interfering nucleic acid molecules of the invention optionally do not include any ribonucleotides (e.g., nucleotides having a 2′-OH group). Such siNA molecules that do not require the presence of ribonucleotides within the siNA molecule to support RNAi can however have an attached linker or linkers or other attached or associated groups, moieties, or chains containing one or more nucleotides with 2′-OH groups. Optionally, siNA molecules can comprise ribonucleotides at about 5, 10, 20, 30, 40, or 50% of the nucleotide positions. The modified short interfering nucleic acid molecules of the invention can also be referred to as short interfering modified oligonucleotides “siMON.” As used herein, the term siNA is meant to be equivalent to other terms used to describe nucleic acid molecules that are capable of mediating sequence specific RNAi, for example short interfering RNA (siRNA), double-stranded RNA (dsRNA), micro-RNA (miRNA), short hairpin RNA (shRNA), short interfering oligonucleotide, short interfering nucleic acid, short interfering modified oligonucleotide, chemically-modified siRNA, post-transcriptional gene silencing RNA (ptgsRNA), and others. In addition, as used herein, the term RNAi is meant to be equivalent to other terms used to describe sequence specific RNA interference, such as post transcriptional gene silencing, translational inhibition, or epigenetics. For example, siNA molecules of the invention can be used to epigenetically silence genes at both the post-transcriptional level or the pre-transcriptional level. In a non-limiting example, epigenetic regulation of gene expression by siNA molecules of the invention can result from siNA mediated modification of chromatin structure to alter gene expression (see, for example, Allshire, 2002, Science, 297, 1818-1819; Volpe et al., 2002, Science, 297, 1833-1837; Jenuwein, 2002, Science, 297, 2215-2218; and Hall et al., 2002, Science, 297, 2232-2237).

[0169] By “modulate” is meant that the expression of the gene, or level of RNA molecule or equivalent RNA molecules encoding one or more proteins or protein subunits, or activity of one or more proteins or protein subunits is up regulated or down regulated, such that expression, level, or activity is greater than or less than that observed in the absence of the modulator. For example, the term “modulate” can mean “inhibit,” but the use of the word “modulate” is not limited to this definition.

[0170] By “inhibit”, “down-regulate”, or “reduce”, it is meant that the expression of the gene, or level of RNA molecules or equivalent RNA molecules encoding one or more proteins or protein subunits, or activity of one or more proteins or protein subunits, is reduced below that observed in the absence of the nucleic acid molecules (e.g., siNA) of the invention. In one embodiment, inhibition, down-regulation or reduction with an siNA molecule is below that level observed in the presence of an inactive or attenuated molecule. In another embodiment, inhibition, down-regulation, or reduction with siNA molecules is below that level observed in the presence of, for example, an siNA molecule with scrambled sequence or with mismatches. In another embodiment, inhibition, down-regulation, or reduction of gene expression with a nucleic acid molecule of the instant invention is greater in the presence of the nucleic acid molecule than in its absence.

[0171] By “gene” or “target gene” is meant, a nucleic acid that encodes an RNA, for example, nucleic acid sequences including, but not limited to, structural genes encoding a polypeptide. The target gene can be a gene derived from a cell, an endogenous gene, a transgene, or exogenous genes such as genes of a pathogen, for example a virus, which is present in the cell after infection thereof. The cell containing the target gene can be derived from or contained in any organism, for example a plant, animal, protozoan, virus, bacterium, or fungus. Non-limiting examples of plants include monocots, dicots, or gymnosperms. Non-limiting examples of animals include vertebrates or invertebrates. Non-limiting examples of fungi include molds or yeasts.

[0172] By “MAP kinase” is meant, any mitogen activated protein kinase (MAP kinase) polypeptide, protein and/or a polynucleotide encoding a MAP kinase protein (such as polynucleotides referred to by Genbank Accession number in Table I or any other MAP kinase transcript derived from a MAP kinase gene, e.g., c-JUN, ERK1, ERK2, JNK1, JNK2, and/or p38). As used herein, the term “MAP kinase gene” is meant to refer to any polynucleotide included in a group of MAP kinase genes, such as c-JUN, ERK1, ERK2, JNK1, JNK2, and/or p38).

[0173] By “MAP kinase protein” is meant, any mitogen activated protein kinase (MAP kinase) peptide or protein or a component thereof, wherein the peptide or protein is encoded by a MAP kinase gene (e.g., c-JUN, ERK1, ERK2, JNK1, JNK2, and/or p38).

[0174] By “highly conserved sequence region” is meant a nucleotide sequence of one or more regions in a target gene does not vary significantly from one generation to the other or from one biological system to the other.

[0175] By “sense region” is meant a nucleotide sequence of a siNA molecule having complementarity to an antisense region of the siNA molecule. In addition, the sense region of a siNA molecule can comprise a nucleic acid sequence having homology with a target nucleic acid sequence.

[0176] By “antisense region” is meant a nucleotide sequence of a siNA molecule having complementarity to a target nucleic acid sequence. In addition, the antisense region of a siNA molecule can optionally comprise a nucleic acid sequence having complementarity to a sense region of the siNA molecule.

[0177] By “target nucleic acid” is meant any nucleic acid sequence whose expression or activity is to be modulated. The target nucleic acid can be DNA or RNA.

[0178] By “complementarity” is meant that a nucleic acid can form hydrogen bond(s) with another nucleic acid sequence by either traditional Watson-Crick or other non-traditional types. In reference to the nucleic molecules of the present invention, the binding free energy for a nucleic acid molecule with its complementary sequence is sufficient to allow the relevant function of the nucleic acid to proceed, e.g., RNAi activity. Determination of binding free energies for nucleic acid molecules is well known in the art (see, e.g., Turner et al., 1987, CSH Symp. Quant. Biol. LII pp. 123-133; Frier et al., 1986, Proc. Nat. Acad. Sci. USA 83:9373-9377; Turner et al., 1987, J. Am. Chem. Soc. 109:3783-3785). A percent complementarity indicates the percentage of contiguous residues in a nucleic acid molecule that can form hydrogen bonds (e.g., Watson-Crick base pairing) with a second nucleic acid sequence (e.g., 5, 6, 7, 8, 9, 10 out of 10 being 50%, 60%, 70%, 80%, 90%, and 100% complementary). “Perfectly complementary” means that all the contiguous residues of a nucleic acid sequence will hydrogen bond with the same number of contiguous residues in a second nucleic acid sequence.

[0179] The siRNA molecules of the invention represent a novel therapeutic approach to treat a variety of pathologic indications or other conditions, including oncology and proliferation related indications and conditions such as multidrug resistant cancers, breast cancer, cancers of the head and neck including various lymphomas such as mantle cell lymphoma, non-Hodgkins lymphoma, adenoma, squamous cell carcinoma, laryngeal carcinoma, cancers of the retina, cancers of the esophagus, multiple myeloma, ovarian cancer, melanoma, colorectal cancer, hepatocellular carcinoma, lung cancer, bladder cancer, pancreatic cancer, prostate cancer, glioblastoma; obesity and insulin resistance (e.g. type I and II diabetes); inflammatory disorders such as asthma, septic shock, rheumatoid arthritis, psoriasis, inflammatory bowl syndrome and any other diseases or conditions that are related to or will respond to the levels of MAP kinase in a cell or tissue, alone or in combination with other therapies. The reduction of MAP kinase expression (specifically MAP kinase gene RNA levels) and thus reduction in the level of the respective protein relieves, to some extent, the symptoms of the disease or condition.

[0180] In one embodiment of the present invention, each sequence of a siNA molecule of the invention is independently about 18 to about 24 nucleotides in length, in specific embodiments about 18, 19, 20, 21, 22, 23, or 24 nucleotides in length. In another embodiment, the siNA duplexes of the invention independently comprise about 17 to about 23 base pairs (e.g., about 17, 18, 19, 20, 21, 22 or 23). In yet another embodiment, siNA molecules of the invention comprising hairpin or circular structures are about 35 to about 55 (e.g., about 35, 40, 45, 50 or 55) nucleotides in length, or about 38 to about 44 (e.g., 38, 39, 40, 41, 42, 43 or 44) nucleotides in length and comprising about 16 to about 22 (e.g., about 16, 17, 18, 19, 20, 21 or 22) base pairs. Exemplary siNA molecules of the invention are shown in Table II. Exemplary synthetic siNA molecules of the invention are shown in Tables III and IV and/or FIGS. 4-5.

[0181] As used herein “cell” is used in its usual biological sense, and does not refer to an entire multicellular organism, e.g., specifically does not refer to a human. The cell can be present in an organism, e.g., birds, plants and mammals such as humans, cows, sheep, apes, monkeys, swine, dogs, and cats. The cell can be prokaryotic (e.g., bacterial cell) or eukaryotic (e.g., mammalian or plant cell). The cell can be of somatic or germ line origin, totipotent or pluripotent, dividing or non-dividing. The cell can also be derived from or can comprise a gamete or embryo, a stem cell, or a fully differentiated cell.

[0182] The siNA molecules of the invention are added directly, or can be complexed with cationic lipids, packaged within liposomes, or otherwise delivered to target cells or tissues. The nucleic acid or nucleic acid complexes can be locally administered to relevant tissues ex vivo, or in vivo through injection, infusion pump or stent, with or without their incorporation in biopolymers. In particular embodiments, the nucleic acid molecules of the invention comprise sequences shown in Tables II-III and/or FIGS. 4-5. Examples of such nucleic acid molecules consist essentially of sequences defined in these tables and figures. Furthermore, the chemically modified constructs described in Table IV can be applied to any siNA sequence of the invention.

[0183] In another aspect, the invention provides mammalian cells containing one or more siNA molecules of this invention. The one or more siNA molecules can independently be targeted to the same or different sites.

[0184] By “RNA” is meant a molecule comprising at least one ribonucleotide residue. By “ribonucleotide” is meant a nucleotide with a hydroxyl group at the 2′ position of a β-D-ribo-furanose moiety. The terms include double-stranded RNA, single-stranded RNA, isolated RNA such as partially purified RNA, essentially pure RNA, synthetic RNA, recombinantly produced RNA, as well as altered RNA that differs from naturally occurring RNA by the addition, deletion, substitution and/or alteration of one or more nucleotides. Such alterations can include addition of non-nucleotide material, such as to the end(s) of the siNA or internally, for example at one or more nucleotides of the RNA. Nucleotides in the RNA molecules of the instant invention can also comprise non-standard nucleotides, such as non-naturally occurring nucleotides or chemically synthesized nucleotides or deoxynucleotides. These altered RNAs can be referred to as analogs or analogs of naturally-occurring RNA.

[0185] By “subject” is meant an organism, which is a donor or recipient of explanted cells or the cells themselves. “Subject” also refers to an organism to which the nucleic acid molecules of the invention can be administered. A subject can be a mammal or mammalian cells, including a human or human cells.

[0186] The term “phosphorothioate” as used herein refers to an internucleotide linkage having Formula I, wherein Z and/or W comprise a sulfur atom. Hence, the term phosphorothioate refers to both phosphorothioate and phosphorodithioate internucleotide linkages.

[0187] The term “universal base” as used herein refers to nucleotide base analogs that form base pairs with each of the natural DNA/RNA bases with little discrimination between them. Non-limiting examples of universal bases include C-phenyl, C-naphthyl and other aromatic derivatives, inosine, azole carboxamides, and nitroazole derivatives such as 3-nitropyrrole, 4-nitroindole, 5-nitroindole, and 6-nitroindole as known in the art (see for example Loakes, 2001, Nucleic Acids Research, 29, 2437-2447).

[0188] The term “acyclic nucleotide” as used herein refers to any nucleotide having an acyclic ribose sugar, for example where any of the ribose carbons (C1, C2, C3, C4, or C5), are independently or in combination absent from the nucleotide.

[0189] The nucleic acid molecules of the instant invention, individually, or in combination or in conjunction with other drugs, can be used to treat diseases or conditions discussed herein (e.g., cancers and other proliferative conditions). For example, to treat a particular disease or condition, the siNA molecules can be administered to a subject or can be administered to other appropriate cells evident to those skilled in the art, individually or in combination with one or more drugs under conditions suitable for the treatment.

[0190] In a further embodiment, the siNA molecules can be used in combination with other known treatments to treat conditions or diseases discussed above. For example, the described molecules could be used in combination with one or more known therapeutic agents to treat a disease or condition. Non-limiting examples of other therapeutic agents that can be readily combined with a siNA molecule of the invention are enzymatic nucleic acid molecules, allosteric nucleic acid molecules, antisense, decoy, or aptamer nucleic acid molecules, antibodies such as monoclonal antibodies, small molecules, and other organic and/or inorganic compounds including metals, salts and ions.

[0191] In one embodiment, the invention features an expression vector comprising a nucleic acid sequence encoding at least one siNA molecule of the invention, in a manner which allows expression of the siNA molecule. For example, the vector can contain sequence(s) encoding both strands of a siNA molecule comprising a duplex. The vector can also contain sequence(s) encoding a single nucleic acid molecule that is self-complementary and thus forms a siNA molecule. Non-limiting examples of such expression vectors are described in Paul et al., 2002, Nature Biotechnology, 19, 505; Miyagishi and Taira, 2002, Nature Biotechnology, 19, 497; Lee et al., 2002, Nature Biotechnology, 19, 500; and Novina et al., 2002, Nature Medicine, advance online publication doi:10.1038/nm725.

[0192] In another embodiment, the invention features a mammalian cell, for example, a human cell, including an expression vector of the invention.

[0193] In yet another embodiment, the expression vector of the invention comprises a sequence for a siNA molecule having complementarity to a RNA molecule referred to by a Genbank Accession numbers, for example Genbank Accession Nos. shown in Table I.

[0194] In one embodiment, an expression vector of the invention comprises a nucleic acid sequence encoding two or more siNA molecules, which can be the same or different.

[0195] In another aspect of the invention, siNA molecules that interact with target RNA molecules and down-regulate gene encoding target RNA molecules (for example target RNA molecules referred to by Genbank Accession numbers herein) are expressed from transcription units inserted into DNA or RNA vectors. The recombinant vectors can be DNA plasmids or viral vectors. siNA expressing viral vectors can be constructed based on, but not limited to, adeno-associated virus, retrovirus, adenovirus, or alphavirus. The recombinant vectors capable of expressing the siNA molecules can be delivered as described herein, and persist in target cells. Alternatively, viral vectors can be used that provide for transient expression of siNA molecules. Such vectors can be repeatedly administered as necessary. Once expressed, the siNA molecules bind and down-regulate gene function or expression via RNA interference (RNAi). Delivery of siNA expressing vectors can be systemic, such as by intravenous or intramuscular administration, by administration to target cells ex-planted from a subject followed by reintroduction into the subject, or by any other means that would allow for introduction into the desired target cell.

[0196] By “vectors” is meant any nucleic acid- and/or viral-based technique used to deliver a desired nucleic acid.

[0197] Other features and advantages of the invention will be apparent from the following description of the preferred embodiments thereof, and from the claims.

### BRIEF DESCRIPTION OF THE DRAWINGS

[0198] FIG. 1 shows a non-limiting example of a scheme for the synthesis of siNA molecules. The complementary siNA sequence strands, strand 1 and strand 2, are synthesized in tandem and are connected by a cleavable linkage, such as a nucleotide succinate or abasic succinate, which can be the same or different from the cleavable linker used for solid phase synthesis on a solid support. The synthesis can be either solid phase or solution phase, in the example shown, the synthesis is a solid phase synthesis. The synthesis is performed such that a protecting group, such as a dimethoxytrityl group, remains intact on the terminal nucleotide of the tandem oligonucleotide. Upon cleavage and deprotection of the oligonucleotide, the two siNA strands spontaneously hybridize to form a siNA duplex, which allows the purification of the duplex by utilizing the properties of the terminal protecting group, for example by applying a trityl on purification method wherein only duplexes/oligonucleotides with the terminal protecting group are isolated.

[0199] FIG. 2 shows a MALDI-TOF mass spectrum of a purified siNA duplex synthesized by a method of the invention. The two peaks shown correspond to the predicted mass of the separate siNA sequence strands. This result demonstrates that the siNA duplex generated from tandem synthesis can be purified as a single entity using a simple trityl-on purification methodology.

[0200] FIG. 3 shows a non-limiting proposed mechanistic representation of target RNA degradation involved in RNAi. Double-stranded RNA (dsRNA), which is generated by RNA-dependent RNA polymerase (RdRP) from foreign single-stranded RNA, for example viral, transposon, or other exogenous RNA, activates the DICER enzyme that in turn generates siNA duplexes. Alternately, synthetic or expressed siNA can be introduced directly into a cell by appropriate means. An active siNA complex forms which recognizes a target RNA, resulting in degradation of the target RNA by the RISC endonuclease complex or in the synthesis of additional RNA by RNA-dependent RNA polymerase (RdRP), which can activate DICER and result in additional siNA molecules, thereby amplifying the RNAi response.

[0201] FIG. 4A-F shows non-limiting examples of chemically-modified siNA constructs of the present invention. In the figure, N stands for any nucleotide (adenosine, guanosine, cytosine, uridine, or optionally thymidine, for example thymidine can be substituted in the overhanging regions designated by parenthesis (N N). Various modifications are shown for the sense and antisense strands of the siNA constructs.

[0202] FIG. 4A: The sense strand comprises 21 nucleotides wherein the two terminal 3′-nucleotides are optionally base paired and wherein all nucleotides present are ribonucleotides except for (N N) nucleotides, which can comprise ribonucleotides, deoxynucleotides, universal bases, or other chemical modifications described herein. The antisense strand comprises 21 nucleotides, optionally having a 3′-terminal glyceryl moiety and wherein the two terminal 3′-nucleotides are optionally complementary to the target RNA sequence, and wherein all nucleotides present are ribonucleotides except for (N N) nucleotides, which can comprise ribonucleotides, deoxynucleotides, universal bases, or other chemical modifications described herein. A modified internucleotide linkage, such as a phosphorothioate, phosphorodithioate or other modified internucleotide linkage as described herein, shown as “s” connects the (N N) nucleotides in the antisense strand.

[0203] FIG. 4B: The sense strand comprises 21 nucleotides wherein the two terminal 3′-nucleotides are optionally base paired and wherein all pyrimidine nucleotides that may be present are 2′-deoxy-2′-fluoro modified nucleotides and all purine nucleotides that may be present are 2′-O-methyl modified nucleotides except for (N N) nucleotides, which can comprise ribonucleotides, deoxynucleotides, universal bases, or other chemical modifications described herein. The antisense strand comprises 21 nucleotides, optionally having a 3′-terminal glyceryl moiety and wherein the two terminal 3′-nucleotides are optionally complementary to the target RNA sequence, and wherein all pyrimidine nucleotides that may be present are 2′-deoxy-2′-fluoro modified nucleotides and all purine nucleotides that may be present are 2′-O-methyl modified nucleotides except for (N N) nucleotides, which can comprise ribonucleotides, deoxynucleotides, universal bases, or other chemical modifications described herein. A modified internucleotide linkage, such as a phosphorothioate, phosphorodithioate or other modified internucleotide linkage as described herein, shown as “s” connects the (N N) nucleotides in the sense and antisense strand.

[0204] FIG. 4C: The sense strand comprises 21 nucleotides having 5′- and 3′-terminal cap moieties wherein the two terminal 3′-nucleotides are optionally base paired and wherein all pyrimidine nucleotides that may be present are 2′-O-methyl or 2′-deoxy-2′-fluoro modified nucleotides except for (N N) nucleotides, which can comprise ribonucleotides, deoxynucleotides, universal bases, or other chemical modifications described herein. The antisense strand comprises 21 nucleotides, optionally having a 3′-terminal glyceryl moiety and wherein the two terminal 3′-nucleotides are optionally complementary to the target RNA sequence, and wherein all pyrimidine nucleotides that may be present are 2′-deoxy-2′-fluoro modified nucleotides except for (N N) nucleotides, which can comprise ribonucleotides, deoxynucleotides, universal bases, or other chemical modifications described herein. A modified internucleotide linkage, such as a phosphorothioate, phosphorodithioate or other modified internucleotide linkage as described herein, shown as “s” connects the (N N) nucleotides in the antisense strand.

[0205] FIG. 4D: The sense strand comprises 21 nucleotides having 5′- and 3′-terminal cap moieties wherein the two terminal 3′-nucleotides are optionally base paired and wherein all pyrimidine nucleotides that may be present are 2′-deoxy-2′-fluoro modified nucleotides except for (N N) nucleotides, which can comprise ribonucleotides, deoxynucleotides, universal bases, or other chemical modifications described herein and wherein and all purine nucleotides that may be present are 2′-deoxy nucleotides. The antisense strand comprises 21 nucleotides, optionally having a 3′-terminal glyceryl moiety and wherein the two terminal 3′-nucleotides are optionally complementary to the target RNA sequence, and wherein all pyrimidine nucleotides that may be present are 2′-deoxy-2′-fluoro modified nucleotides and all purine nucleotides that may be present are 2′-O-methyl modified nucleotides except for (N N) nucleotides, which can comprise ribonucleotides, deoxynucleotides, universal bases, or other chemical modifications described herein. A modified internucleotide linkage, such as a phosphorothioate, phosphorodithioate or other modified internucleotide linkage as described herein, shown as “s” connects the (N N) nucleotides in the antisense strand.

[0206] FIG. 4E: The sense strand comprises 21 nucleotides having 5′- and 3′-terminal cap moieties wherein the two terminal 3′-nucleotides are optionally base paired and wherein all pyrimidine nucleotides that may be present are 2′-deoxy-2′-fluoro modified nucleotides except for (N N) nucleotides, which can comprise ribonucleotides, deoxynucleotides, universal bases, or other chemical modifications described herein. The antisense strand comprises 21 nucleotides, optionally having a 3′-terminal glyceryl moiety and wherein the two terminal 3′-nucleotides are optionally complementary to the target RNA sequence, and wherein all pyrimidine nucleotides that may be present are 2′-deoxy-2′-fluoro modified nucleotides and all purine nucleotides that may be present are 2′-O-methyl modified nucleotides except for (N N) nucleotides, which can comprise ribonucleotides, deoxynucleotides, universal bases, or other chemical modifications described herein. A modified internucleotide linkage, such as a phosphorothioate, phosphorodithioate or other modified internucleotide linkage as described herein, shown as “s” connects the (N N) nucleotides in the antisense strand.

[0207] FIG. 4F: The sense strand comprises 21 nucleotides having 5′- and 3′-terminal cap moieties wherein the two terminal 3′-nucleotides are optionally base paired and wherein all pyrimidine nucleotides that may be present are 2′-deoxy-2′-fluoro modified nucleotides except for (N N) nucleotides, which can comprise ribonucleotides, deoxynucleotides, universal bases, or other chemical modifications described herein and wherein and all purine nucleotides that may be present are 2′-deoxy nucleotides. The antisense strand comprises 21 nucleotides, optionally having a 3′-terminal glyceryl moiety and wherein the two terminal 3′-nucleotides are optionally complementary to the target RNA sequence, and wherein all pyrimidine nucleotides that may be present are 2′-deoxy-2′-fluoro modified nucleotides and all purine nucleotides that may be present are 2′-deoxy nucleotides except for (N N) nucleotides, which can comprise ribonucleotides, deoxynucleotides, universal bases, or other chemical modifications described herein. A modified internucleotide linkage, such as a phosphorothioate, phosphorodithioate or other modified internucleotide linkage as described herein, shown as “s” connects the (N N) nucleotides in the antisense strand. The antisense strand of constructs A-F comprise sequence complementary to any target nucleic acid sequence of the invention. Furthermore, when a glyceryl moiety (L) is present at the 3′-end of the antisense strand for any construct shown in FIG. 4 A-F, the modified internucleotide linkage is optional.

[0208] FIG. 5A-F shows non-limiting examples of specific chemically-modified siNA sequences of the invention. A-F applies the chemical modifications described in FIG. 4A-F to a c-JUN siNA sequence. Such chemical modifications can be applied to any sequence herein, such as any MAP kinase sequence.

[0209] FIG. 6 shows non-limiting examples of different siNA constructs of the invention. The examples shown (constructs 1, 2, and 3) have 19 representative base pairs; however, different embodiments of the invention include any number of base pairs described herein. Bracketed regions represent nucleotide overhangs, for example comprising about 1, 2, 3, or 4 nucleotides in length, preferably about 2 nucleotides. Constructs 1 and 2 can be used independently for RNAi activity. Construct 2 can comprise a polynucleotide or non-nucleotide linker, which can optionally be designed as a biodegradable linker. In one embodiment, the loop structure shown in construct 2 can comprise a biodegradable linker that results in the formation of construct 1 in vivo and/or in vitro. In another example, construct 3 can be used to generate construct 2 under the same principle wherein a linker is used to generate the active siNA construct 2 in vivo and/or in vitro, which can optionally utilize another biodegradable linker to generate the active siNA construct 1 in vivo and/or in vitro. As such, the stability and/or activity of the siNA constructs can be modulated based on the design of the siNA construct for use in vivo or in vitro and/or in vitro.

[0210] FIG. 7A-C is a diagrammatic representation of a scheme utilized in generating an expression cassette to generate siNA hairpin constructs.

[0211] FIG. 7A: A DNA oligomer is synthesized with a 5′-restriction site (R1) sequence followed by a region having sequence identical (sense region of siNA) to a predetermined MAP kinase target sequence, wherein the sense region comprises, for example, about 19, 20, 21, or 22 nucleotides (N) in length, which is followed by a loop sequence of defined sequence (X), comprising, for example, about 3 to about 10 nucleotides.

[0212] FIG. 7B: The synthetic construct is then extended by DNA polymerase to generate a hairpin structure having self-complementary sequence that will result in a siNA transcript having specificity for a MAP kinase target sequence and having self-complementary sense and antisense regions.

[0213] FIG. 7C: The construct is heated (for example to about 95° C.) to linearize the sequence, thus allowing extension of a complementary second DNA strand using a primer to the 3′-restriction sequence of the first strand. The double-stranded DNA is then inserted into an appropriate vector for expression in cells. The construct can be designed such that a 3′-terminal nucleotide overhang results from the transcription, for example by engineering restriction sites and/or utilizing a poly-U termination region as described in Paul et al., 2002, Nature Biotechnology, 29, 505-508.

[0214] FIG. 8A-C is a diagrammatic representation of a scheme utilized in generating an expression cassette to generate double-stranded siNA constructs.

[0215] FIG. 8A: A DNA oligomer is synthesized with a 5′-restriction (R1) site sequence followed by a region having sequence identical (sense region of siNA) to a predetermined MAP kinase target sequence, wherein the sense region comprises, for example, about 19, 20, 21, or 22 nucleotides (N) in length, and which is followed by a 3′-restriction site (R2) which is adjacent to a loop sequence of defined sequence (X).

[0216] FIG. 8B: The synthetic construct is then extended by DNA polymerase to generate a hairpin structure having self-complementary sequence.

[0217] FIG. 8C: The construct is processed by restriction enzymes specific to R1 and R2 to generate a double-stranded DNA which is then inserted into an appropriate vector for expression in cells. The transcription cassette is designed such that a U6 promoter region flanks each side of the dsDNA which generates the separate sense and antisense strands of the siNA. Poly T termination sequences can be added to the constructs to generate U overhangs in the resulting transcript.

[0218] FIG. 9A-E is a diagrammatic representation of a method used to determine target sites for siNA mediated RNAi within a particular target nucleic acid sequence, such as messenger RNA.

[0219] FIG. 9A: A pool of siNA oligonucleotides are synthesized wherein the antisense region of the siNA constructs has complementarity to target sites across the target nucleic acid sequence, and wherein the sense region comprises sequence complementary to the antisense region of the siNA.

[0220] FIGS. 9B&C: (FIG. 9B) The sequences are pooled and are inserted into vectors such that (FIG. 9C) transfection of a vector into cells results in the expression of the siNA.

[0221] FIG. 9D: Cells are sorted based on phenotypic change that is associated with modulation of the target nucleic acid sequence.

[0222] FIG. 9E: The siNA is isolated from the sorted cells and is sequenced to identify efficacious target sites within the target nucleic acid sequence.

[0223] FIG. 10 shows non-limiting examples of different stabilization chemistries (1-10) that can be used, for example, to stabilize the 3′-end of siNA sequences of the invention, including (1) [3-3′]-inverted deoxyribose; (2) deoxyribonucleotide; (3) [5′-3′]-3′-deoxyribonucleotide; (4) [5′-3′]-ribonucleotide; (5) [5′-3′]-3′-O-methyl ribonucleotide; (6) 3′-glyceryl; (7) [3′-5′]-3′-deoxyribonucleotide; (8) [3′-3′]-deoxyribonucleotide; (9) [5′-2′]-deoxyribonucleotide; and (10) [5-3′]-dideoxyribonucleotide. In addition to modified and unmodified backbone chemistries indicated in the figure, these chemistries can be combined with different backbone modifications as described herein, for example, backbone modifications having Formula I. In addition, the 2′-deoxy nucleotide shown 5′ to the terminal modifications shown can be another modified or unmodified nucleotide or non-nucleotide described herein, for example modifications having any of Formulae I-VII or any combination thereof.

[0224] FIG. 11 shows a non-limiting example of a strategy used to identify chemically modified siNA constructs of the invention that are nuclease resistance while preserving the ability to mediate RNAi activity. Chemical modifications are introduced into the siNA construct based on educated design parameters (e.g. introducing 2′-modifications, base modifications, backbone modifications, terminal cap modifications etc). The modified construct in tested in an appropriate system (e.g. human serum for nuclease resistance, shown, or an animal model for PK/delivery parameters). In parallel, the siNA construct is tested for RNAi activity, for example in a cell culture system such as a luciferase reporter assay). Lead siNA constructs are then identified which possess a particular characteristic while maintaining RNAi activity, and can be further modified and assayed once again. This same approach can be used to identify siNA-conjugate molecules with improved pharmacokinetic profiles, delivery, and RNAi activity.

[0225] FIG. 12 shows a non-limiting example of reduction of p38 mRNA in A549 cells mediated by siNAs that target p38 mRNA. A549 cells were transfected with 0.25 ug/well of lipid complexed with 25 nM siNA. A screen of siNA constructs comprising ribonucleotides and 3′-terminal dithymidine caps was compared to untreated cells, scrambled siNA control constructs (Scram1 and Scram2), and cells transfected with lipid alone (transfection control). As shown in the figure, the siNA constructs significantly reduce p38 RNA expression.

[0226] FIG. 13 shows a non-limiting example of reduction of JNK1 mRNA in A549 cells mediated by siNAs that target JNK1 mRNA. A549 cells were transfected with 0.25 ug/well of lipid complexed with 25 nM siNA. A screen of siNA constructs comprising ribonucleotides and 3′-terminal dithymidine caps was compared to untreated cells, scrambled siNA control constructs (Scram1 and Scram2), and cells transfected with lipid alone (transfection control). As shown in the figure, the siNA constructs significantly reduce JNK1 RNA expression.

### DETAILED DESCRIPTION OF THE INVENTION

### Mechanism of Action of Nucleic Acid Molecules of the Invention

[0227] The discussion that follows discusses the proposed mechanism of RNA interference mediated by short interfering RNA as is presently known, and is not meant to be limiting and is not an admission of prior art. Applicant demonstrates herein that chemically-modified short interfering nucleic acids possess similar or improved capacity to mediate RNAi as do siRNA molecules and are expected to possess improved stability and activity in vivo; therefore, this discussion is not meant to be limited to siRNA only and can be applied to siNA as a whole. By “improved capacity to mediate RNAi” or “improved RNAi activity” is meant to include RNAi activity measured in vitro and/or in vivo where the RNAi activity is a reflection of both the ability of the siNA to mediate RNAi and the stability of the siNAs of the invention. In this invention, the product of these activities can be increased in vitro and/or in vivo compared to an all RNA siRNA or a siNA containing a plurality of ribonucleotides. In some cases, the activity or stability of the siNA molecule can be decreased (i.e., less than ten-fold), but the overall activity of the siNA molecule is enhanced in vitro and/or in vivo.

[0228] RNA interference refers to the process of sequence specific post-transcriptional gene silencing in animals mediated by short interfering RNAs (siRNAs) (Fire et al., 1998, Nature, 391, 806). The corresponding process in plants is commonly referred to as post-transcriptional gene silencing or RNA silencing and is also referred to as quelling in fungi. The process of post-transcriptional gene silencing is thought to be an evolutionarily-conserved cellular defense mechanism used to prevent the expression of foreign genes which is commonly shared by diverse flora and phyla (Fire et al., 1999, Trends Genet., 15, 358). Such protection from foreign gene expression may have evolved in response to the production of double-stranded RNAs (dsRNAs) derived from viral infection or the random integration of transposon elements into a host genome via a cellular response that specifically destroys homologous single-stranded RNA or viral genomic RNA. The presence of dsRNA in cells triggers the RNAi response though a mechanism that has yet to be fully characterized. This mechanism appears to be different from the interferon response that results from dsRNA-mediated activation of protein kinase PKR and 2′,5′-oligoadenylate synthetase resulting in non-specific cleavage of mRNA by ribonuclease L.

[0229] The presence of long dsRNAs in cells stimulates the activity of a ribonuclease III enzyme referred to as Dicer. Dicer is involved in the processing of the dsRNA into short pieces of dsRNA known as short interfering RNAs (siRNAs) (Berstein et al., 2001, Nature, 409, 363). Short interfering RNAs derived from Dicer activity are typically about 21 to about 23 nucleotides in length and comprise about 19 base pair duplexes. Dicer has also been implicated in the excision of 21- and 22-nucleotide small temporal RNAs (stRNAs) from precursor RNA of conserved structure that are implicated in translational control (Hutvagner et al., 2001, Science, 293, 834). The RNAi response also features an endonuclease complex containing a siRNA, commonly referred to as an RNA-induced silencing complex (RISC), which mediates cleavage of single-stranded RNA having sequence homologous to the siRNA. Cleavage of the target RNA takes place in the middle of the region complementary to the guide sequence of the siRNA duplex (Elbashir et al., 2001, Genes Dev., 15, 188). In addition, RNA interference can also involve small RNA (e.g., micro-RNA or miRNA) mediated gene silencing, presumably though cellular mechanisms that regulate chromatin structure and thereby prevent transcription of target gene sequences (see for example Allshire, 2002, Science, 297, 1818-1819; Volpe et al., 2002, Science, 297, 1833-1837; Jenuwein, 2002, Science, 297, 2215-2218; and Hall et al., 2002, Science, 297, 2232-2237). As such, siNA molecules of the invention can be used to mediate gene silencing via interaction with RNA transcripts or alternately by interaction with particular gene sequences, wherein such interaction results in gene silencing either at the transcriptional level or post-transcriptional level.

[0230] RNAi has been studied in a variety of systems. Fire et al., 1998, Nature, 391, 806, were the first to observe RNAi in C. elegans. Wianny and Goetz, 1999, Nature Cell Biol., 2, 70, describe RNAi mediated by dsRNA in mouse embryos. Hammond et al., 2000, Nature, 404, 293, describe RNAi in Drosophila cells transfected with dsRNA. Elbashir et al., 2001, Nature, 411, 494, describe RNAi induced by introduction of duplexes of synthetic 21-nucleotide RNAs in cultured mammalian cells including human embryonic kidney and HeLa cells. Recent work in Drosophila embryonic lysates has revealed certain requirements for siRNA length, structure, chemical composition, and sequence that are essential to mediate efficient RNAi activity. These studies have shown that 21 nucleotide siRNA duplexes are most active when containing two 2-nucleotide 3′-terminal nucleotide overhangs. Furthermore, substitution of one or both siRNA strands with 2′-deoxy or 2′-O-methyl nucleotides abolishes RNAi activity, whereas substitution of 3′-terminal siRNA nucleotides with deoxy nucleotides was shown to be tolerated. Mismatch sequences in the center of the siRNA duplex were also shown to abolish RNAi activity. In addition, these studies also indicate that the position of the cleavage site in the target RNA is defined by the 5′-end of the siRNA guide sequence rather than the 3′-end (Elbashir et al., 2001, EMBO J., 20, 6877). Other studies have indicated that a 5′-phosphate on the target-complementary strand of a siRNA duplex is required for siRNA activity and that ATP is utilized to maintain the 5′-phosphate moiety on the siRNA (Nykanen et al., 2001, Cell, 107, 309); however, siRNA molecules lacking a 5′-phosphate are active when introduced exogenously, suggesting that 5′-phosphorylation of siRNA constructs may occur in vivo.

### Synthesis of Nucleic Acid Molecules

[0231] Synthesis of nucleic acids greater than 100 nucleotides in length is difficult using automated methods, and the therapeutic cost of such molecules is prohibitive. In this invention, small nucleic acid motifs (“small” refers to nucleic acid motifs no more than 100 nucleotides in length, preferably no more than 80 nucleotides in length, and most preferably no more than 50 nucleotides in length; e.g., individual siNA oligonucleotide sequences or siNA sequences synthesized in tandem) are preferably used for exogenous delivery. The simple structure of these molecules increases the ability of the nucleic acid to invade targeted regions of protein and/or RNA structure. Exemplary molecules of the instant invention are chemically synthesized, and others can similarly be synthesized.

[0232] Oligonucleotides (e.g., certain modified oligonucleotides or portions of oligonucleotides lacking ribonucleotides) are synthesized using protocols known in the art, for example as described in Caruthers et al., 1992, Methods in Enzymology 211, 3-19, Thompson et al., International PCT Publication No. WO 99/54459, Wincott et al., 1995, Nucleic Acids Res. 23, 2677-2684, Wincott et al., 1997, Methods Mol. Bio., 74, 59, Brennan et al., 1998, Biotechnol Bioeng., 61, 33-45, and Brennan, U.S. Pat. No. 6,001,311. All of these references are incorporated herein by reference. The synthesis of oligonucleotides makes use of common nucleic acid protecting and coupling groups, such as dimethoxytrityl at the 5′-end, and phosphoramidites at the 3′-end. In a non-limiting example, small scale syntheses are conducted on a 394 Applied Biosystems, Inc. synthesizer using a 0.2 μmol scale protocol with a 2.5 minute coupling step for 2′-O-methylated nucleotides and a 45 second coupling step for 2′-deoxy nucleotides or 2′-deoxy-2′-fluoro nucleotides. Table V outlines the amounts and the contact times of the reagents used in the synthesis cycle. Alternatively, syntheses at the 0.2 μmol scale can be performed on a 96-well plate synthesizer, such as the instrument produced by Protogene (Palo Alto, Calif.) with minimal modification to the cycle. A 33-fold excess (60 μL of 0.11 M=6.6 μmol) of 2′-O-methyl phosphoramidite and a 105-fold excess of S-ethyl tetrazole (60 μL of 0.25 M=15 μmol) can be used in each coupling cycle of 2′-O-methyl residues relative to polymer-bound 5′-hydroxyl. A 22-fold excess (40 μL of 0.11 M=4.4 μmol) of deoxy phosphoramidite and a 70-fold excess of S-ethyl tetrazole (40 μL of 0.25 M=10 μmol) can be used in each coupling cycle of deoxy residues relative to polymer-bound 5′-hydroxyl. Average coupling yields on the 394 Applied Biosystems, Inc. synthesizer, determined by colorimetric quantitation of the trityl fractions, are typically 97.5-99%. Other oligonucleotide synthesis reagents for the 394 Applied Biosystems, Inc. synthesizer include the following: detritylation solution is 3% TCA in methylene chloride (ABI); capping is performed with 16% N-methyl imidazole in THF (ABI) and 10% acetic anhydride/10% 2,6-lutidine in THF (ABI); and oxidation solution is 16.9 mM 12, 49 mM pyridine, 9% water in THF (PERSEPTIVE™). Burdick & Jackson Synthesis Grade acetonitrile is used directly from the reagent bottle. S-Ethyltetrazole solution (0.25 M in acetonitrile) is made up from the solid obtained from American International Chemical, Inc. Alternately, for the introduction of phosphorothioate linkages, Beaucage reagent (3H-1,2-Benzodithiol-3-one 1,1-dioxide, 0.05 M in acetonitrile) is used.

[0233] Deprotection of the DNA-based oligonucleotides is performed as follows: the polymer-bound trityl-on oligoribonucleotide is transferred to a 4 mL glass screw top vial and suspended in a solution of 40% aqueous methylamine (1 mL) at 65° C. for 10 minutes. After cooling to −20° C., the supernatant is removed from the polymer support. The support is washed three times with 1.0 mL of EtOH:MeCN:H₂O/3:1:1, vortexed and the supernatant is then added to the first supernatant. The combined supernatants, containing the oligoribonucleotide, are dried to a white powder.

[0234] The method of synthesis used for RNA including certain siNA molecules of the invention follows the procedure as described in Usman et al., 1987, J. Am. Chem. Soc., 109, 7845; Scaringe et al., 1990, Nucleic Acids Res., 18, 5433; and Wincott et al., 1995, Nucleic Acids Res. 23, 2677-2684 Wincott et al., 1997, Methods Mol. Bio., 74, 59, and makes use of common nucleic acid protecting and coupling groups, such as dimethoxytrityl at the 5′-end, and phosphoramidites at the 3′-end. In a non-limiting example, small scale syntheses are conducted on a 394 Applied Biosystems, Inc. synthesizer using a 0.2 μmol scale protocol with a 7.5 minute coupling step for alkylsilyl protected nucleotides and a 2.5 minute coupling step for 2′-O-methylated nucleotides. Table V outlines the amounts and the contact times of the reagents used in the synthesis cycle. Alternatively, syntheses at the 0.2 μmol scale can be done on a 96-well plate synthesizer, such as the instrument produced by Protogene (Palo Alto, Calif.) with minimal modification to the cycle. A 33-fold excess (60 μL of 0.11 M=6.6 μmol) of 2′-O-methyl phosphoramidite and a 75-fold excess of S-ethyl tetrazole (60 μL of 0.25 M=15 μmol) can be used in each coupling cycle of 2′-O-methyl residues relative to polymer-bound 5′-hydroxyl. A 66-fold excess (120 μL of 0.11 M=13.2 μmol) of alkylsilyl (ribo) protected phosphoramidite and a 150-fold excess of S-ethyl tetrazole (120 μL of 0.25 M=30 μmol) can be used in each coupling cycle of ribo residues relative to polymer-bound 5′-hydroxyl. Average coupling yields on the 394 Applied Biosystems, Inc. synthesizer, determined by colorimetric quantitation of the trityl fractions, are typically 97.5-99%. Other oligonucleotide synthesis reagents for the 394 Applied Biosystems, Inc. synthesizer include the following: detritylation solution is 3% TCA in methylene chloride (ABI); capping is performed with 16% N-methyl imidazole in THF (ABI) and 10% acetic anhydride/10% 2,6-lutidine in THF (ABI); oxidation solution is 16.9 mM 12, 49 mM pyridine, 9% water in THF (PERSEPTIVE™). Burdick & Jackson Synthesis Grade acetonitrile is used directly from the reagent bottle. S-Ethyltetrazole solution (0.25 M in acetonitrile) is made up from the solid obtained from American International Chemical, Inc. Alternately, for the introduction of phosphorothioate linkages, Beaucage reagent (3H-1,2-Benzodithiol-3-one 1,1-dioxide 0.05 M in acetonitrile) is used.

[0235] Deprotection of the RNA is performed using either a two-pot or one-pot protocol. For the two-pot protocol, the polymer-bound trityl-on oligoribonucleotide is transferred to a 4 mL glass screw top vial and suspended in a solution of 40% aq. methylamine (1 mL) at 65° C. for 10 minutes. After cooling to −20° C., the supernatant is removed from the polymer support. The support is washed three times with 1.0 mL of EtOH:MeCN:H₂O/3:1:1, vortexed and the supernatant is then added to the first supernatant. The combined supernatants, containing the oligoribonucleotide, are dried to a white powder. The base deprotected oligoribonucleotide is resuspended in anhydrous TEA/HF/NMP solution (300 μL of a solution of 1.5 mL N-methylpyrrolidinone, 750 μL TEA and 1 mL TEA.3HF to provide a 1.4 M HF concentration) and heated to 65° C. After 1.5 hours, the oligomer is quenched with 1.5 M NH₄HCO₃.

[0236] Alternatively, for the one-pot protocol, the polymer-bound trityl-on oligoribonucleotide is transferred to a 4 mL glass screw top vial and suspended in a solution of 33% ethanolic methylamine/DMSO: 1/1 (0.8 mL) at 65° C. for 15 minutes. The vial is brought to room temperature. TEA.3HF (0.1 mL) is added and the vial is heated at 65° C. for 15 minutes. The sample is cooled at −20° C. and then quenched with 1.5 M NH₄HCO₃.

[0237] For purification of the trityl-on oligomers, the quenched NH₄.HCO₃ solution is loaded onto a C-18 containing cartridge that had been prewashed with acetonitrile followed by 50 mM TEAA. After washing the loaded cartridge with water, the RNA is detritylated with 0.5% TFA for 13 minutes. The cartridge is then washed again with water, salt exchanged with 1 M NaCl and washed with water again. The oligonucleotide is then eluted with 30% acetonitrile.

[0238] The average stepwise coupling yields are typically >98% (Wincott et al., 1995 Nucleic Acids Res. 23, 2677-2684). Those of ordinary skill in the art will recognize that the scale of synthesis can be adapted to be larger or smaller than the example described above including but not limited to 96-well format.

[0239] Alternatively, the nucleic acid molecules of the present invention can be synthesized separately and joined together post-synthetically, for example, by ligation (Moore et al., 1992, Science 256, 9923; Draper et al., International PCT publication No. WO 93/23569; Shabarova et al., 1991, Nucleic Acids Research 19, 4247; Bellon et al., 1997, Nucleosides & Nucleotides, 16, 951; Bellon et al., 1997, Bioconjugate Chem. 8, 204), or by hybridization following synthesis and/or deprotection.

[0240] The siNA molecules of the invention can also be synthesized via a tandem synthesis methodology as described in Example 1 herein, wherein both siNA strands are synthesized as a single contiguous oligonucleotide fragment or strand separated by a cleavable linker which is subsequently cleaved to provide separate siNA fragments or strands that hybridize and permit purification of the siNA duplex. The linker can be a polynucleotide linker or a non-nucleotide linker. The tandem synthesis of siNA as described herein can be readily adapted to both multiwell/multiplate synthesis platforms such as 96 well or similarly larger multi-well platforms. The tandem synthesis of siNA as described herein can also be readily adapted to large scale synthesis platforms employing batch reactors, synthesis columns and the like.

[0241] A siNA molecule can also be assembled from two distinct nucleic acid strands or fragments wherein one fragment includes the sense region and the second fragment includes the antisense region of the RNA molecule.

[0242] The nucleic acid molecules of the present invention can be modified extensively to enhance stability by modification with nuclease resistant groups, for example, 2′-amino, 2′-C-allyl, 2′-fluoro, 2′-O-methyl, 2′-H (for a review see Usman and Cedergren, 1992, TIBS 17, 34; Usman et al., 1994, Nucleic Acids Symp. Ser. 31, 163). siNA constructs can be purified by gel electrophoresis using general methods or can be purified by high pressure liquid chromatography (HPLC; see Wincott et al., supra, the totality of which is hereby incorporated herein by reference) and re-suspended in water.

[0243] In another aspect of the invention, siNA molecules of the invention are expressed from transcription units inserted into DNA or RNA vectors. The recombinant vectors can be DNA plasmids or viral vectors. siNA expressing viral vectors can be constructed based on, but not limited to, adeno-associated virus, retrovirus, adenovirus, or alphavirus. The recombinant vectors capable of expressing the siNA molecules can be delivered as described herein, and persist in target cells. Alternatively, viral vectors can be used that provide for transient expression of siNA molecules.

### Optimizing Activity of the Nucleic Acid Molecule of the Invention.

[0244] Chemically synthesizing nucleic acid molecules with modifications (base, sugar and/or phosphate) can prevent their degradation by serum ribonucleases, which can increase their potency (see e.g., Eckstein et al., International Publication No. WO 92/07065; Perrault et al., 1990 Nature 344, 565; Pieken et al., 1991, Science 253, 314; Usman and Cedergren, 1992, Trends in Biochem. Sci. 17, 334; Usman et al., International Publication No. WO 93/15187; and Rossi et al., International Publication No. WO 91/03162; Sproat, U.S. Pat. No. 5,334,711; Gold et al., U.S. Pat. No. 6,300,074; and Burgin et al., supra; all of which are incorporated by reference herein). All of the above references describe various chemical modifications that can be made to the base, phosphate and/or sugar moieties of the nucleic acid molecules described herein. Modifications that enhance their efficacy in cells, and removal of bases from nucleic acid molecules to shorten oligonucleotide synthesis times and reduce chemical requirements are desired.

[0245] There are several examples in the art describing sugar, base and phosphate modifications that can be introduced into nucleic acid molecules with significant enhancement in their nuclease stability and efficacy. For example, oligonucleotides are modified to enhance stability and/or enhance biological activity by modification with nuclease resistant groups, for example, 2′-amino, 2′-C-allyl, 2′-fluoro, 2′-O-methyl, 2′-O-allyl, 2′-H, nucleotide base modifications (for a review see Usman and Cedergren, 1992, TIBS. 17, 34; Usman et al., 1994, Nucleic Acids Symp. Ser. 31, 163; Burgin et al., 1996, Biochemistry, 35, 14090). Sugar modification of nucleic acid molecules have been extensively described in the art (see Eckstein et al., International Publication PCT No. WO 92/07065; Perrault et al. Nature, 1990, 344, 565-568; Pieken et al. Science, 1991, 253, 314-317; Usman and Cedergren, Trends in Biochem. Sci., 1992, 17, 334-339; Usman et al. International Publication PCT No. WO 93/15187; Sproat, U.S. Pat. No. 5,334,711 and Beigelman et al., 1995, J. Biol. Chem., 270, 25702; Beigelman et al., International PCT publication No. WO 97/26270; Beigelman et al., U.S. Pat. No. 5,716,824; Usman et al., U.S. Pat. No. 5,627,053; Woolf et al., International PCT Publication No. WO 98/13526; Thompson et al., U.S. Ser. No. 60/082,404 which was filed on Apr. 20, 1998; Karpeisky et al., 1998, Tetrahedron Lett., 39, 1131; Earnshaw and Gait, 1998, Biopolymers (Nucleic Acid Sciences), 48, 39-55; Verma and Eckstein, 1998, Annu. Rev. Biochem., 67, 99-134; and Burlina et al., 1997, Bioorg. Med. Chem., 5, 1999-2010; all of the references are hereby incorporated in their totality by reference herein). Such publications describe general methods and strategies to determine the location of incorporation of sugar, base and/or phosphate modifications and the like into nucleic acid molecules without modulating catalysis, and are incorporated by reference herein. In view of such teachings, similar modifications can be used as described herein to modify the siNA nucleic acid molecules of the instant invention so long as the ability of siNA to promote RNAi is cells is not significantly inhibited.

[0246] While chemical modification of oligonucleotide internucleotide linkages with phosphorothioate, phosphorodithioate, and/or 5′-methylphosphonate linkages improves stability, excessive modifications can cause some toxicity or decreased activity. Therefore, when designing nucleic acid molecules, the amount of these internucleotide linkages should be minimized. The reduction in the concentration of these linkages should lower toxicity, resulting in increased efficacy and higher specificity of these molecules.

[0247] Short interfering nucleic acid (siNA) molecules having chemical modifications that maintain or enhance activity are provided. Such a nucleic acid is also generally more resistant to nucleases than an unmodified nucleic acid. Accordingly, the in vitro and/or in vivo activity should not be significantly lowered. In cases in which modulation is the goal, therapeutic nucleic acid molecules delivered exogenously should optimally be stable within cells until translation of the target RNA has been modulated long enough to reduce the levels of the undesirable protein. This period of time varies between hours to days depending upon the disease state. Improvements in the chemical synthesis of RNA and DNA (Wincott et al., 1995, Nucleic Acids Res. 23, 2677; Caruthers et al., 1992, Methods in Enzymology 211, 3-19 (incorporated by reference herein)) have expanded the ability to modify nucleic acid molecules by introducing nucleotide modifications to enhance their nuclease stability, as described above.

[0248] In one embodiment, nucleic acid molecules of the invention include one or more (e.g., about 1, 2, 3, 4, 5, 6, 7, 8, 9, 10, or more) G-clamp nucleotides. A G-clamp nucleotide is a modified cytosine analog wherein the modifications confer the ability to hydrogen bond both Watson-Crick and Hoogsteen faces of a complementary guanine within a duplex, see for example Lin and Matteucci, 1998, J. Am. Chem. Soc., 120, 8531-8532. A single G-clamp analog substitution within an oligonucleotide can result in substantially enhanced helical thermal stability and mismatch discrimination when hybridized to complementary oligonucleotides. The inclusion of such nucleotides in nucleic acid molecules of the invention results in both enhanced affinity and specificity to nucleic acid targets, complementary sequences, or template strands. In another embodiment, nucleic acid molecules of the invention include one or more (e.g., about 1, 2, 3, 4, 5, 6, 7, 8, 9, 10, or more) LNA “locked nucleic acid” nucleotides such as a 2′,4′-C methylene bicyclo nucleotide (see for example Wengel et al., International PCT Publication No. WO 00/66604 and WO 99/14226).

[0249] In another embodiment, the invention features conjugates and/or complexes of siNA molecules of the invention. Such conjugates and/or complexes can be used to facilitate delivery of siNA molecules into a biological system, such as a cell. The conjugates and complexes provided by the instant invention can impart therapeutic activity by transferring therapeutic compounds across cellular membranes, altering the pharmacokinetics, and/or modulating the localization of nucleic acid molecules of the invention. The present invention encompasses the design and synthesis of novel conjugates and complexes for the delivery of molecules, including, but not limited to, small molecules, lipids, cholesterol, phospholipids, nucleosides, nucleotides, nucleic acids, antibodies, toxins, negatively charged polymers and other polymers, for example, proteins, peptides, hormones, carbohydrates, polyethylene glycols, or polyamines, across cellular membranes. In general, the transporters described are designed to be used either individually or as part of a multi-component system, with or without degradable linkers. These compounds are expected to improve delivery and/or localization of nucleic acid molecules of the invention into a number of cell types originating from different tissues, in the presence or absence of serum (see Sullenger and Cech, U.S. Pat. No. 5,854,038). Conjugates of the molecules described herein can be attached to biologically active molecules via linkers that are biodegradable, such as biodegradable nucleic acid linker molecules.

[0250] The term “biodegradable linker” as used herein, refers to a nucleic acid or non-nucleic acid linker molecule that is designed as a biodegradable linker to connect one molecule to another molecule, for example, a biologically active molecule to a siNA molecule of the invention or the sense and antisense strands of a siNA molecule of the invention. The biodegradable linker is designed such that its stability can be modulated for a particular purpose, such as delivery to a particular tissue or cell type. The stability of a nucleic acid-based biodegradable linker molecule can be modulated by using various chemistries, for example combinations of ribonucleotides, deoxyribonucleotides, and chemically-modified nucleotides, such as 2′-O-methyl, 2′-fluoro, 2′-amino, 2′-O-amino, 2′-C-allyl, 2′-O-allyl, and other 2′-modified or base modified nucleotides. The biodegradable nucleic acid linker molecule can be a dimer, trimer, tetramer or longer nucleic acid molecule, for example, an oligonucleotide of about 2, 3, 4, 5, 6, 7, 8, 9, 10, 11, 12, 13, 14, 15, 16, 17, 18, 19, or 20 nucleotides in length, or can comprise a single nucleotide with a phosphorus-based linkage, for example, a phosphoramidate or phosphodiester linkage. The biodegradable nucleic acid linker molecule can also comprise nucleic acid backbone, nucleic acid sugar, or nucleic acid base modifications.

[0251] The term “biodegradable” as used herein, refers to degradation in a biological system, for example enzymatic degradation or chemical degradation.

[0252] The term “biologically active molecule” as used herein, refers to compounds or molecules that are capable of eliciting or modifying a biological response in a system. Non-limiting examples of biologically active siNA molecules either alone or in combination with other molecules contemplated by the instant invention include therapeutically active molecules such as antibodies, cholesterol, hormones, antivirals, peptides, proteins, chemotherapeutics, small molecules, vitamins, co-factors, nucleosides, nucleotides, oligonucleotides, enzymatic nucleic acids, antisense nucleic acids, triplex forming oligonucleotides, 2,5-A chimeras, siNA, dsRNA, allozymes, aptamers, decoys and analogs thereof. Biologically active molecules of the invention also include molecules capable of modulating the pharmacokinetics and/or pharmacodynamics of other biologically active molecules, for example, lipids and polymers such as polyamines, polyamides, polyethylene glycol and other polyethers.

[0253] The term “phospholipid” as used herein, refers to a hydrophobic molecule comprising at least one phosphorus group. For example, a phospholipid can comprise a phosphorus-containing group and saturated or unsaturated alkyl group, optionally substituted with OH, COOH, oxo, amine, or substituted or unsubstituted aryl groups.

[0254] Therapeutic nucleic acid molecules (e.g., siNA molecules) delivered exogenously optimally are stable within cells until reverse transcription of the RNA has been modulated long enough to reduce the levels of the RNA transcript. The nucleic acid molecules are resistant to nucleases in order to function as effective intracellular therapeutic agents. Improvements in the chemical synthesis of nucleic acid molecules described in the instant invention and in the art have expanded the ability to modify nucleic acid molecules by introducing nucleotide modifications to enhance their nuclease stability as described above.

[0255] In yet another embodiment, siNA molecules having chemical modifications that maintain or enhance enzymatic activity of proteins involved in RNAi are provided. Such nucleic acids are also generally more resistant to nucleases than unmodified nucleic acids. Thus, in vitro and/or in vivo the activity should not be significantly lowered.

[0256] Use of the nucleic acid-based molecules of the invention will lead to better treatment of the disease progression by affording the possibility of combination therapies (e.g., multiple siNA molecules targeted to different genes; nucleic acid molecules coupled with known small molecule modulators; or intermittent treatment with combinations of molecules, including different motifs and/or other chemical or biological molecules). The treatment of subjects with siNA molecules can also include combinations of different types of nucleic acid molecules, such as enzymatic nucleic acid molecules (ribozymes), allozymes, antisense, 2,5-A oligoadenylate, decoys, and aptamers.

[0257] In another aspect a siNA molecule of the invention comprises one or more 5′ and/or a 3′-cap structure, for example on only the sense siNA strand, the antisense siNA strand, or both siNA strands.

[0258] By “cap structure” is meant chemical modifications, which have been incorporated at either terminus of the oligonucleotide (see, for example, Adamic et al., U.S. Pat. No. 5,998,203, incorporated by reference herein). These terminal modifications protect the nucleic acid molecule from exonuclease degradation, and can help in delivery and/or localization within a cell. The cap can be present at the 5′-terminus (5′-cap) or at the 3′-terminal (3′-cap) or can be present on both termini. Non-limiting examples of the 5′-cap include, but are not limited to, glyceryl, inverted deoxy abasic residue (moiety); 4′,5′-methylene nucleotide; 1-(beta-D-erythrofuranosyl) nucleotide, 4′-thio nucleotide; carbocyclic nucleotide; 1,5-anhydrohexitol nucleotide; L-nucleotides; alpha-nucleotides; modified base nucleotide; phosphorodithioate linkage; threo-pentofuranosyl nucleotide; acyclic 3′,4′-seco nucleotide; acyclic 3,4-dihydroxybutyl nucleotide; acyclic 3,5-dihydroxypentyl nucleotide, 3′-3′-inverted nucleotide moiety; 3′-3′-inverted abasic moiety; 3′-2′-inverted nucleotide moiety; 3′-2′-inverted abasic moiety; 1,4-butanediol phosphate; 3′-phosphoramidate; hexylphosphate; aminohexyl phosphate; 3′-phosphate; 3′-phosphorothioate; phosphorodithioate; or bridging or non-bridging methylphosphonate moiety.

[0259] Non-limiting examples of the 3′-cap include, but are not limited to, glyceryl, inverted deoxy abasic residue (moiety), 4′,5′-methylene nucleotide; 1-(beta-D-erythrofuranosyl) nucleotide; 4′-thio nucleotide, carbocyclic nucleotide; 5′-amino-alkyl phosphate; 1,3-diamino-2-propyl phosphate; 3-aminopropyl phosphate; 6-aminohexyl phosphate; 1,2-aminododecyl phosphate; hydroxypropyl phosphate; 1,5-anhydrohexitol nucleotide; L-nucleotide; alpha-nucleotide; modified base nucleotide; phosphorodithioate; threo-pentofuranosyl nucleotide; acyclic 3′,4′-seco nucleotide; 3,4-dihydroxybutyl nucleotide; 3,5-dihydroxypentyl nucleotide, 5′-5′-inverted nucleotide moiety; 5′-5′-inverted abasic moiety; 5′-phosphoramidate; 5′-phosphorothioate; 1,4-butanediol phosphate; 5′-amino; bridging and/or non-bridging 5′-phosphoramidate, phosphorothioate and/or phosphorodithioate, bridging or non bridging methylphosphonate and 5′-mercapto moieties (for more details see Beaucage and Iyer, 1993, Tetrahedron 49, 1925; incorporated by reference herein).

[0260] By the term “non-nucleotide” is meant any group or compound which can be incorporated into a nucleic acid chain in the place of one or more nucleotide units, including either sugar and/or phosphate substitutions, and allows the remaining bases to exhibit their enzymatic activity. The group or compound is abasic in that it does not contain a commonly recognized nucleotide base, such as adenosine, guanine, cytosine, uracil or thymine and therefore lacks a base at the 1′-position.

[0261] An “alkyl” group refers to a saturated aliphatic hydrocarbon, including straight-chain, branched-chain, and cyclic alkyl groups. Preferably, the alkyl group has 1 to 12 carbons. More preferably, it is a lower alkyl of from 1 to 7 carbons, more preferably 1 to 4 carbons. The alkyl group can be substituted or unsubstituted. When substituted the substituted group(s) is preferably, hydroxyl, cyano, alkoxy, ═O, ═S, NO₂ or N(CH₃)₂, amino, or SH. The term also includes alkenyl groups that are unsaturated hydrocarbon groups containing at least one carbon-carbon double bond, including straight-chain, branched-chain, and cyclic groups. Preferably, the alkenyl group has 1 to 12 carbons. More preferably, it is a lower alkenyl of from 1 to 7 carbons, more preferably 1 to 4 carbons. The alkenyl group may be substituted or unsubstituted. When substituted the substituted group(s) is preferably, hydroxyl, cyano, alkoxy, ═O, ═S, NO₂, halogen, N(CH₃)₂, amino, or SH. The term “alkyl” also includes alkynyl groups that have an unsaturated hydrocarbon group containing at least one carbon-carbon triple bond, including straight-chain, branched-chain, and cyclic groups. Preferably, the alkynyl group has 1 to 12 carbons. More preferably, it is a lower alkynyl of from 1 to 7 carbons, more preferably 1 to 4 carbons. The alkynyl group may be substituted or unsubstituted. When substituted the substituted group(s) is preferably, hydroxyl, cyano, alkoxy, ═O, ═S, NO₂ or N(CH₃)₂, amino or SH.

[0262] Such alkyl groups can also include aryl, alkylaryl, carbocyclic aryl, heterocyclic aryl, amide and ester groups. An “aryl” group refers to an aromatic group that has at least one ring having a conjugated pi electron system and includes carbocyclic aryl, heterocyclic aryl and biaryl groups, all of which may be optionally substituted. The preferred substituent(s) of aryl groups are halogen, trihalomethyl, hydroxyl, SH, OH, cyano, alkoxy, alkyl, alkenyl, alkynyl, and amino groups. An “alkylaryl” group refers to an alkyl group (as described above) covalently joined to an aryl group (as described above). Carbocyclic aryl groups are groups wherein the ring atoms on the aromatic ring are all carbon atoms. The carbon atoms are optionally substituted. Heterocyclic aryl groups are groups having from 1 to 3 heteroatoms as ring atoms in the aromatic ring and the remainder of the ring atoms are carbon atoms. Suitable heteroatoms include oxygen, sulfur, and nitrogen, and include furanyl, thienyl, pyridyl, pyrrolyl, N-lower alkyl pyrrolo, pyrimidyl, pyrazinyl, imidazolyl and the like, all optionally substituted. An “amide” refers to an —C(O)—NH—R, where R is either alkyl, aryl, alkylaryl or hydrogen. An “ester” refers to an —C(O)—OR, where R is either alkyl, aryl, alkylaryl or hydrogen.

[0263] By “nucleotide” as used herein is as recognized in the art to include natural bases (standard), and modified bases well known in the art. Such bases are generally located at the 1′ position of a nucleotide sugar moiety. Nucleotides generally comprise a base, sugar and a phosphate group. The nucleotides can be unmodified or modified at the sugar, phosphate and/or base moiety, (also referred to interchangeably as nucleotide analogs, modified nucleotides, non-natural nucleotides, non-standard nucleotides and other; see, for example, Usman and McSwiggen, supra; Eckstein et al., International PCT Publication No. WO 92/07065; Usman et al., International PCT Publication No. WO 93/15187; Uhlman & Peyman, supra, all are hereby incorporated by reference herein). There are several examples of modified nucleic acid bases known in the art as summarized by Limbach et al., 1994, Nucleic Acids Res. 22, 2183. Some of the non-limiting examples of base modifications that can be introduced into nucleic acid molecules include, inosine, purine, pyridin-4-one, pyridin-2-one, phenyl, pseudouracil, 2,4,6-trimethoxy benzene, 3-methyl uracil, dihydrouridine, naphthyl, aminophenyl, 5-alkylcytidines (e.g., 5-methylcytidine), 5-alkyluridines (e.g., ribothymidine), 5-halouridine (e.g., 5-bromouridine) or 6-azapyrimidines or 6-alkylpyrimidines (e.g. 6-methyluridine), propyne, and others (Burgin et al., 1996, Biochemistry, 35, 14090; Uhlman & Peyman, supra). By “modified bases” in this aspect is meant nucleotide bases other than adenine, guanine, cytosine and uracil at 1′ position or their equivalents.

[0264] In one embodiment, the invention features modified siNA molecules, with phosphate backbone modifications comprising one or more phosphorothioate, phosphorodithioate, methylphosphonate, phosphotriester, morpholino, amidate carbamate, carboxymethyl, acetamidate, polyamide, sulfonate, sulfonamide, sulfamate, formacetal, thioformacetal, and/or alkylsilyl, substitutions. For a review of oligonucleotide backbone modifications, see Hunziker and Leumann, 1995, Nucleic Acid Analogues: Synthesis and Properties, in Modern Synthetic Methods, VCH, 331-417, and Mesmaeker et al., 1994, Novel Backbone Replacements for Oligonucleotides, in Carbohydrate Modifications in Antisense Research, ACS, 24-39.

[0265] By “abasic” is meant sugar moieties lacking a base or having other chemical groups in place of a base at the 1′ position, see for example Adamic et al., U.S. Pat. No. 5,998,203.

[0266] By “unmodified nucleoside” is meant one of the bases adenine, cytosine, guanine, thymine, or uracil joined to the 1′ carbon of β-D-ribo-furanose.

[0267] By “modified nucleoside” is meant any nucleotide base which contains a modification in the chemical structure of an unmodified nucleotide base, sugar and/or phosphate. Non-limiting examples of modified nucleotides are shown by Formulae I-VII and/or other modifications described herein.

[0268] In connection with 2′-modified nucleotides as described for the present invention, by “amino” is meant 2′-NH₂ or 2′-O—NH₂, which can be modified or unmodified. Such modified groups are described, for example, in Eckstein et al., U.S. Pat. No. 5,672,695 and Matulic-Adamic et al., U.S. Pat. No. 6,248,878, which are both incorporated by reference in their entireties.

[0269] Various modifications to nucleic acid siNA structure can be made to enhance the utility of these molecules. Such modifications will enhance shelf-life, half-life in vitro, stability, and ease of introduction of such oligonucleotides to the target site, e.g., to enhance penetration of cellular membranes, and confer the ability to recognize and bind to targeted cells.

### Administration of Nucleic Acid Molecules

[0270] A siNA molecule of the invention can be adapted for use to treat, for example, oncology and proliferation related indications and conditions such as multidrug resistant cancers, breast cancer, cancers of the head and neck including various lymphomas such as mantle cell lymphoma, non-Hodgkins lymphoma, adenoma, squamous cell carcinoma, laryngeal carcinoma, cancers of the retina, cancers of the esophagus, multiple myeloma, ovarian cancer, melanoma, colorectal cancer, hepatocellular carcinoma, lung cancer, bladder cancer, pancreatic cancer, prostate cancer, glioblastoma; obesity and insulin resistance (e.g. type I and II diabetes); inflammatory disorders such as asthma, septic shock, rheumatoid arthritis, psoriasis, inflammatory bowl syndrome and any other diseases or conditions that are related to or will respond to the levels of MAP kinase in a cell or tissue, alone or in combination with other therapies. For example, a siNA molecule can comprise a delivery vehicle, including liposomes, for administration to a subject, carriers and diluents and their salts, and/or can be present in pharmaceutically acceptable formulations. Methods for the delivery of nucleic acid molecules are described in Akhtar et al., 1992, Trends Cell Bio., 2, 139; Delivery Strategies for Antisense Oligonucleotide Therapeutics, ed. Akhtar, 1995, Maurer et al., 1999, Mol. Membr. Biol., 16, 129-140; Hofland and Huang, 1999, Handb. Exp. Pharmacol., 137, 165-192; and Lee et al., 2000, ACS Symp. Ser., 752, 184-192, all of which are incorporated herein by reference. Beigelman et al., U.S. Pat. No. 6,395,713 and Sullivan et al., PCT WO 94/02595 further describe the general methods for delivery of nucleic acid molecules. These protocols can be utilized for the delivery of virtually any nucleic acid molecule. Nucleic acid molecules can be administered to cells by a variety of methods known to those of skill in the art, including, but not restricted to, encapsulation in liposomes, by iontophoresis, or by incorporation into other vehicles, such as biodegradable polymers, hydrogels, cyclodextrins (see for example Gonzalez et al., 1999, Bioconjugate Chem., 10, 1068-1074), poly(lactic-co-glycolic)acid (PLGA) and PLCA microspheres (see for example U.S. Pat. No. 6,447,796 and US Patent Application Publication No. US 2002130430), biodegradable nanocapsules, and bioadhesive microspheres, or by proteinaceous vectors (O'Hare and Normand, International PCT Publication No. WO 00/53722). Alternatively, the nucleic acid/vehicle combination is locally delivered by direct injection or by use of an infusion pump. Direct injection of the nucleic acid molecules of the invention, whether subcutaneous, intramuscular, or intradermal, can take place using standard needle and syringe methodologies, or by needle-free technologies such as those described in Conry et al., 1999, Clin. Cancer Res., 5, 2330-2337 and Barry et al., International PCT Publication No. WO 99/31262. The molecules of the instant invention can be used as pharmaceutical agents. Pharmaceutical agents prevent, modulate the occurrence, or treat (alleviate a symptom to some extent, preferably all of the symptoms) of a disease state in a subject.

[0271] Thus, the invention features a pharmaceutical composition comprising one or more nucleic acid(s) of the invention in an acceptable carrier, such as a stabilizer, buffer, and the like. The polynucleotides of the invention can be administered (e.g., RNA, DNA or protein) and introduced into a subject by any standard means, with or without stabilizers, buffers, and the like, to form a pharmaceutical composition. When it is desired to use a liposome delivery mechanism, standard protocols for formation of liposomes can be followed. The compositions of the present invention can also be formulated and used as tablets, capsules or elixirs for oral administration, suppositories for rectal administration, sterile solutions, suspensions for injectable administration, and the other compositions known in the art.

[0272] The present invention also includes pharmaceutically acceptable formulations of the compounds described. These formulations include salts of the above compounds, e.g., acid addition salts, for example, salts of hydrochloric, hydrobromic, acetic acid, and benzene sulfonic acid.

[0273] A pharmacological composition or formulation refers to a composition or formulation in a form suitable for administration, e.g., systemic administration, into a cell or subject, including for example a human. Suitable forms, in part, depend upon the use or the route of entry, for example oral, transdermal, or by injection. Such forms should not prevent the composition or formulation from reaching a target cell (i.e., a cell to which the negatively charged nucleic acid is desirable for delivery). For example, pharmacological compositions injected into the blood stream should be soluble. Other factors are known in the art, and include considerations such as toxicity and forms that prevent the composition or formulation from exerting its effect.

[0274] By “systemic administration” is meant in vivo systemic absorption or accumulation of drugs in the blood stream followed by distribution throughout the entire body. Administration routes that lead to systemic absorption include, without limitation: intravenous, subcutaneous, intraperitoneal, inhalation, oral, intrapulmonary and intramuscular. Each of these administration routes exposes the siNA molecules of the invention to an accessible diseased tissue. The rate of entry of a drug into the circulation has been shown to be a function of molecular weight or size. The use of a liposome or other drug carrier comprising the compounds of the instant invention can potentially localize the drug, for example, in certain tissue types, such as the tissues of the reticular endothelial system (RES). A liposome formulation that can facilitate the association of drug with the surface of cells, such as, lymphocytes and macrophages is also useful. This approach can provide enhanced delivery of the drug to target cells by taking advantage of the specificity of macrophage and lymphocyte immune recognition of abnormal cells, such as cells producing excess MAP kinase.

[0275] By “pharmaceutically acceptable formulation” is meant a composition or formulation that allows for the effective distribution of the nucleic acid molecules of the instant invention in the physical location most suitable for their desired activity. Non-limiting examples of agents suitable for formulation with the nucleic acid molecules of the instant invention include: P-glycoprotein inhibitors (such as Pluronic P85), which can enhance entry of drugs into the CNS (Jolliet-Riant and Tillement, 1999, Fundam. Clin. Pharmacol., 13, 16-26); biodegradable polymers, such as poly (DL-lactide-coglycolide) microspheres for sustained release delivery after intracerebral implantation (Emerich, D F et al, 1999, Cell Transplant, 8, 47-58) (Alkermes, Inc. Cambridge, Mass.); and loaded nanoparticles, such as those made of polybutylcyanoacrylate, which can deliver drugs across the blood brain barrier and can alter neuronal uptake mechanisms (Prog Neuropsychopharmacol Biol Psychiatry, 23, 941-949, 1999). Other non-limiting examples of delivery strategies for the nucleic acid molecules of the instant invention include material described in Boado et al., 1998, J. Pharm. Sci., 87, 1308-1315; Tyler et al., 1999, FEBS Lett., 421, 280-284; Pardridge et al., 1995, PNAS USA., 92, 5592-5596; Boado, 1995, Adv. Drug Delivery Rev., 15, 73-107; Aldrian-Herrada et al., 1998, Nucleic Acids Res., 26, 4910-4916; and Tyler et al., 1999, PNAS USA., 96, 7053-7058.

[0276] The invention also features the use of the composition comprising surface-modified liposomes containing poly (ethylene glycol) lipids (PEG-modified, or long-circulating liposomes or stealth liposomes). These formulations offer a method for increasing the accumulation of drugs in target tissues. This class of drug carriers resists opsonization and elimination by the mononuclear phagocytic system (MPS or RES), thereby enabling longer blood circulation times and enhanced tissue exposure for the encapsulated drug (Lasic et al. Chem. Rev. 1995, 95, 2601-2627; Ishiwata et al., Chem. Pharm. Bull. 1995, 43, 1005-1011). Such liposomes have been shown to accumulate selectively in tumors, presumably by extravasation and capture in the neovascularized target tissues (Lasic et al., Science 1995, 267, 1275-1276; Oku et al., 1995, Biochim. Biophys. Acta, 1238, 86-90). The long-circulating liposomes enhance the pharmacokinetics and pharmacodynamics of DNA and RNA, particularly compared to conventional cationic liposomes which are known to accumulate in tissues of the MPS (Liu et al., J. Biol. Chem. 1995, 42, 24864-24870; Choi et al., International PCT Publication No. WO 96/10391; Ansell et al., International PCT Publication No. WO 96/10390; Holland et al., International PCT Publication No. WO 96/10392). Long-circulating liposomes are also likely to protect drugs from nuclease degradation to a greater extent compared to cationic liposomes, based on their ability to avoid accumulation in metabolically aggressive MPS tissues such as the liver and spleen.

[0277] The present invention also includes compositions prepared for storage or administration that include a pharmaceutically effective amount of the desired compounds in a pharmaceutically acceptable carrier or diluent. Acceptable carriers or diluents for therapeutic use are well known in the pharmaceutical art, and are described, for example, in Remington's Pharmaceutical Sciences, Mack Publishing Co. (A. R. Gennaro edit. 1985), hereby incorporated by reference herein. For example, preservatives, stabilizers, dyes and flavoring agents can be provided. These include sodium benzoate, sorbic acid and esters of p-hydroxybenzoic acid. In addition, antioxidants and suspending agents can be used.

[0278] A pharmaceutically effective dose is that dose required to prevent, inhibit the occurrence, or treat (alleviate a symptom to some extent, preferably all of the symptoms) of a disease state. The pharmaceutically effective dose depends on the type of disease, the composition used, the route of administration, the type of mammal being treated, the physical characteristics of the specific mammal under consideration, concurrent medication, and other factors that those skilled in the medical arts will recognize. Generally, an amount between 0.1 mg/kg and 100 mg/kg body weight/day of active ingredients is administered dependent upon potency of the negatively charged polymer.

[0279] The nucleic acid molecules of the invention and formulations thereof can be administered orally, topically, parenterally, by inhalation or spray, or rectally in dosage unit formulations containing conventional non-toxic pharmaceutically acceptable carriers, adjuvants and/or vehicles. The term parenteral as used herein includes percutaneous, subcutaneous, intravascular (e.g., intravenous), intramuscular, or intrathecal injection or infusion techniques and the like. In addition, there is provided a pharmaceutical formulation comprising a nucleic acid molecule of the invention and a pharmaceutically acceptable carrier. One or more nucleic acid molecules of the invention can be present in association with one or more non-toxic pharmaceutically acceptable carriers and/or diluents and/or adjuvants, and if desired other active ingredients. The pharmaceutical compositions containing nucleic acid molecules of the invention can be in a form suitable for oral use, for example, as tablets, troches, lozenges, aqueous or oily suspensions, dispersible powders or granules, emulsion, hard or soft capsules, or syrups or elixirs.

[0280] Compositions intended for oral use can be prepared according to any method known to the art for the manufacture of pharmaceutical compositions and such compositions can contain one or more such sweetening agents, flavoring agents, coloring agents or preservative agents in order to provide pharmaceutically elegant and palatable preparations. Tablets contain the active ingredient in admixture with non-toxic pharmaceutically acceptable excipients that are suitable for the manufacture of tablets. These excipients can be, for example, inert diluents; such as calcium carbonate, sodium carbonate, lactose, calcium phosphate or sodium phosphate; granulating and disintegrating agents, for example, corn starch, or alginic acid; binding agents, for example starch, gelatin or acacia; and lubricating agents, for example magnesium stearate, stearic acid or talc. The tablets can be uncoated or they can be coated by known techniques. In some cases such coatings can be prepared by known techniques to delay disintegration and absorption in the gastrointestinal tract and thereby provide a sustained action over a longer period. For example, a time delay material such as glyceryl monostearate or glyceryl distearate can be employed.

[0281] Formulations for oral use can also be presented as hard gelatin capsules wherein the active ingredient is mixed with an inert solid diluent, for example, calcium carbonate, calcium phosphate or kaolin, or as soft gelatin capsules wherein the active ingredient is mixed with water or an oil medium, for example peanut oil, liquid paraffin or olive oil.

[0282] Aqueous suspensions contain the active materials in a mixture with excipients suitable for the manufacture of aqueous suspensions. Such excipients are suspending agents, for example sodium carboxymethylcellulose, methylcellulose, hydropropyl-methylcellulose, sodium alginate, polyvinylpyrrolidone, gum tragacanth and gum acacia; dispersing or wetting agents can be a naturally-occurring phosphatide, for example, lecithin, or condensation products of an alkylene oxide with fatty acids, for example polyoxyethylene stearate, or condensation products of ethylene oxide with long chain aliphatic alcohols, for example heptadecaethyleneoxycetanol, or condensation products of ethylene oxide with partial esters derived from fatty acids and a hexitol such as polyoxyethylene sorbitol monooleate, or condensation products of ethylene oxide with partial esters derived from fatty acids and hexitol anhydrides, for example polyethylene sorbitan monooleate. The aqueous suspensions can also contain one or more preservatives, for example ethyl, or n-propyl p-hydroxybenzoate, one or more coloring agents, one or more flavoring agents, and one or more sweetening agents, such as sucrose or saccharin.

[0283] Oily suspensions can be formulated by suspending the active ingredients in a vegetable oil, for example arachis oil, olive oil, sesame oil or coconut oil, or in a mineral oil such as liquid paraffin. The oily suspensions can contain a thickening agent, for example beeswax, hard paraffin or cetyl alcohol. Sweetening agents and flavoring agents can be added to provide palatable oral preparations. These compositions can be preserved by the addition of an anti-oxidant such as ascorbic acid

[0284] Dispersible powders and granules suitable for preparation of an aqueous suspension by the addition of water provide the active ingredient in admixture with a dispersing or wetting agent, suspending agent and one or more preservatives. Suitable dispersing or wetting agents or suspending agents are exemplified by those already mentioned above. Additional excipients, for example sweetening, flavoring and coloring agents, can also be present.

[0285] Pharmaceutical compositions of the invention can also be in the form of oil-in-water emulsions. The oily phase can be a vegetable oil or a mineral oil or mixtures of these. Suitable emulsifying agents can be naturally-occurring gums, for example gum acacia or gum tragacanth, naturally-occurring phosphatides, for example soy bean, lecithin, and esters or partial esters derived from fatty acids and hexitol, anhydrides, for example sorbitan monooleate, and condensation products of the said partial esters with ethylene oxide, for example polyoxyethylene sorbitan monooleate. The emulsions can also contain sweetening and flavoring agents.

[0286] Syrups and elixirs can be formulated with sweetening agents, for example glycerol, propylene glycol, sorbitol, glucose or sucrose. Such formulations can also contain a demulcent, a preservative and flavoring and coloring agents. The pharmaceutical compositions can be in the form of a sterile injectable aqueous or oleaginous suspension. This suspension can be formulated according to the known art using those suitable dispersing or wetting agents and suspending agents that have been mentioned above. The sterile injectable preparation can also be a sterile injectable solution or suspension in a non-toxic parentally acceptable diluent or solvent, for example as a solution in 1,3-butanediol. Among the acceptable vehicles and solvents that can be employed are water, Ringer's solution and isotonic sodium chloride solution. In addition, sterile, fixed oils are conventionally employed as a solvent or suspending medium. For this purpose, any bland fixed oil can be employed including synthetic mono- or diglycerides. In addition, fatty acids such as oleic acid find use in the preparation of injectables.

[0287] The nucleic acid molecules of the invention can also be administered in the form of suppositories, e.g., for rectal administration of the drug. These compositions can be prepared by mixing the drug with a suitable non-irritating excipient that is solid at ordinary temperatures but liquid at the rectal temperature and will therefore melt in the rectum to release the drug. Such materials include cocoa butter and polyethylene glycols.

[0288] Nucleic acid molecules of the invention can be administered parenterally in a sterile medium. The drug, depending on the vehicle and concentration used, can either be suspended or dissolved in the vehicle. Advantageously, adjuvants such as local anesthetics, preservatives and buffering agents can be dissolved in the vehicle.

[0289] Dosage levels of the order of from about 0.1 mg to about 140 mg per kilogram of body weight per day are useful in the treatment of the above-indicated conditions (about 0.5 mg to about 7 g per subject per day). The amount of active ingredient that can be combined with the carrier materials to produce a single dosage form varies depending upon the host treated and the particular mode of administration. Dosage unit forms generally contain between from about 1 mg to about 500 mg of an active ingredient.

[0290] It is understood that the specific dose level for any particular subject depends upon a variety of factors including the activity of the specific compound employed, the age, body weight, general health, sex, diet, time of administration, route of administration, and rate of excretion, drug combination and the severity of the particular disease undergoing therapy.

[0291] For administration to non-human animals, the composition can also be added to the animal feed or drinking water. It can be convenient to formulate the animal feed and drinking water compositions so that the animal takes in a therapeutically appropriate quantity of the composition along with its diet. It can also be convenient to present the composition as a premix for addition to the feed or drinking water.

[0292] The nucleic acid molecules of the present invention can also be administered to a subject in combination with other therapeutic compounds to increase the overall therapeutic effect. The use of multiple compounds to treat an indication can increase the beneficial effects while reducing the presence of side effects.

[0293] In one embodiment, the invention comprises compositions suitable for administering nucleic acid molecules of the invention to specific cell types. For example, the asialoglycoprotein receptor (ASGPr) (Wu and Wu, 1987, J. Biol. Chem. 262, 4429-4432) is unique to hepatocytes and binds branched galactose-terminal glycoproteins, such as asialoorosomucoid (ASOR). In another example, the folate receptor is overexpressed in many cancer cells. Binding of such glycoproteins, synthetic glycoconjugates, or folates to the receptor takes place with an affinity that strongly depends on the degree of branching of the oligosaccharide chain, for example, triatennary structures are bound with greater affinity than biatenarry or monoatennary chains (Baenziger and Fiete, 1980, Cell, 22, 611-620; Connolly et al., 1982, J. Biol. Chem., 257, 939-945). Lee and Lee, 1987, Glycoconjugate J., 4, 317-328, obtained this high specificity through the use of N-acetyl-D-galactosamine as the carbohydrate moiety, which has higher affinity for the receptor, compared to galactose. This “clustering effect” has also been described for the binding and uptake of mannosyl-terminating glycoproteins or glycoconjugates (Ponpipom et al., 1981, J. Med. Chem., 24, 1388-1395). The use of galactose, galactosamine, or folate based conjugates to transport exogenous compounds across cell membranes can provide a targeted delivery approach to, for example, the treatment of liver disease, cancers of the liver, or other cancers. The use of bioconjugates can also provide a reduction in the required dose of therapeutic compounds required for treatment. Furthermore, therapeutic bioavailability, pharmacodynamics, and pharmacokinetic parameters can be modulated through the use of nucleic acid bioconjugates of the invention. Non-limiting examples of such bioconjugates are described in Vargeese et al., U.S. Ser. No. 10/201,394, filed Aug. 13, 2001; and Matulic-Adamic et al., U.S. Ser. No. 60/362,016, filed Mar. 6, 2002.

[0294] Alternatively, certain siNA molecules of the instant invention can be expressed within cells from eukaryotic promoters (e.g., Izant and Weintraub, 1985, Science, 229, 345; McGarry and Lindquist, 1986, Proc. Natl. Acad. Sci., USA 83, 399; Scanlon et al., 1991, Proc. Natl. Acad. Sci. USA, 88, 10591-5; Kashani-Sabet et al., 1992, Antisense Res. Dev., 2, 3-15; Dropulic et al., 1992, J. Virol., 66, 1432-41; Weerasinghe et al., 1991, J. Virol., 65, 5531-4; Ojwang et al., 1992, Proc. Natl. Acad. Sci. USA, 89, 10802-6; Chen et al., 1992, Nucleic Acids Res., 20, 4581-9; Sarver et al., 1990 Science, 247, 1222-1225; Thompson et al., 1995, Nucleic Acids Res., 23, 2259; Good et al., 1997, Gene Therapy, 4, 45. Those skilled in the art realize that any nucleic acid can be expressed in eukaryotic cells from the appropriate DNA/RNA vector. The activity of such nucleic acids can be augmented by their release from the primary transcript by an enzymatic nucleic acid (Draper et al., PCT WO 93/23569, and Sullivan et al., PCT WO 94/02595; Ohkawa et al., 1992, Nucleic Acids Symp. Ser., 27, 15-6; Taira et al., 1991, Nucleic Acids Res., 19, 5125-30; Ventura et al., 1993, Nucleic Acids Res., 21, 3249-55; Chowrira et al., 1994, J. Biol. Chem., 269, 25856.

[0295] In another aspect of the invention, RNA molecules of the present invention can be expressed from transcription units (see for example Couture et al., 1996, TIG., 12, 510) inserted into DNA or RNA vectors. The recombinant vectors can be DNA plasmids or viral vectors. siNA expressing viral vectors can be constructed based on, but not limited to, adeno-associated virus, retrovirus, adenovirus, or alphavirus. In another embodiment, pol III based constructs are used to express nucleic acid molecules of the invention (see for example Thompson, U.S. Pats. Nos. 5,902,880 and 6,146,886). The recombinant vectors capable of expressing the siNA molecules can be delivered as described above, and persist in target cells. Alternatively, viral vectors can be used that provide for transient expression of nucleic acid molecules. Such vectors can be repeatedly administered as necessary. Once expressed, the siNA molecule interacts with the target mRNA and generates an RNAi response. Delivery of siNA molecule expressing vectors can be systemic, such as by intravenous or intramuscular administration, by administration to target cells ex-planted from a subject followed by reintroduction into the subject, or by any other means that would allow for introduction into the desired target cell (for a review see Couture et al., 1996, TIG., 12, 510).

[0296] In one aspect the invention features an expression vector comprising a nucleic acid sequence encoding at least one siNA molecule of the instant invention. The expression vector can encode one or both strands of a siNA duplex, or a single self-complementary strand that self hybridizes into a siNA duplex. The nucleic acid sequences encoding the siNA molecules of the instant invention can be operably linked in a manner that allows expression of the siNA molecule (see for example Paul et al., 2002, Nature Biotechnology, 19, 505; Miyagishi and Taira, 2002, Nature Biotechnology, 19, 497; Lee et al., 2002, Nature Biotechnology, 19, 500; and Novina et al., 2002, Nature Medicine, advance online publication doi:10.1038/nm725).

[0297] In another aspect, the invention features an expression vector comprising: a) a transcription initiation region (e.g., eukaryotic pol I, II or III initiation region); b) a transcription termination region (e.g., eukaryotic pol I, II or III termination region); and c) a nucleic acid sequence encoding at least one of the siNA molecules of the instant invention, wherein said sequence is operably linked to said initiation region and said termination region in a manner that allows expression and/or delivery of the siNA molecule. The vector can optionally include an open reading frame (ORF) for a protein operably linked on the 5′ side or the 3′-side of the sequence encoding the siNA of the invention and/or an intron (intervening sequences).

[0298] Transcription of the siNA molecule sequences can be driven from a promoter for eukaryotic RNA polymerase I (pol I), RNA polymerase II (pol II), or RNA polymerase III (pol III). Transcripts from pol II or pol III promoters are expressed at high levels in all cells; the levels of a given pol II promoter in a given cell type depends on the nature of the gene regulatory sequences (enhancers, silencers, etc.) present nearby. Prokaryotic RNA polymerase promoters are also used, providing that the prokaryotic RNA polymerase enzyme is expressed in the appropriate cells (Elroy-Stein and Moss, 1990, Proc. Natl. Acad. Sci. USA, 87, 6743-7; Gao and Huang 1993, Nucleic Acids Res., 21, 2867-72; Lieber et al., 1993, Methods Enzymol., 217, 47-66; Zhou et al., 1990, Mol. Cell. Biol., 10, 4529-37). Several investigators have demonstrated that nucleic acid molecules expressed from such promoters can function in mammalian cells (e.g. Kashani-Sabet et al., 1992, Antisense Res. Dev., 2, 3-15; Ojwang et al., 1992, Proc. Natl. Acad. Sci. USA, 89, 10802-6; Chen et al., 1992, Nucleic Acids Res., 20, 4581-9; Yu et al., 1993, Proc. Natl. Acad. Sci. USA, 90, 6340-4; L'Huillier et al., 1992, EMBO J., 11, 4411-8; Lisziewicz et al., 1993, Proc. Natl. Acad. Sci. U.S. A, 90, 8000-4; Thompson et al., 1995, Nucleic Acids Res., 23, 2259; Sullenger & Cech, 1993, Science, 262, 1566). More specifically, transcription units such as the ones derived from genes encoding U6 small nuclear (snRNA), transfer RNA (tRNA) and adenovirus VA RNA are useful in generating high concentrations of desired RNA molecules such as siNA in cells (Thompson et al., supra; Couture and Stinchcomb, 1996, supra; Noonberg et al., 1994, Nucleic Acid Res., 22, 2830; Noonberg et al., U.S. Pat. No. 5,624,803; Good et al., 1997, Gene Ther., 4, 45; Beigelman et al., International PCT Publication No. WO 96/18736. The above siNA transcription units can be incorporated into a variety of vectors for introduction into mammalian cells, including but not restricted to, plasmid DNA vectors, viral DNA vectors (such as adenovirus or adeno-associated virus vectors), or viral RNA vectors (such as retroviral or alphavirus vectors) (for a review see Couture and Stinchcomb, 1996, supra).

[0299] In another aspect the invention features an expression vector comprising a nucleic acid sequence encoding at least one of the siNA molecules of the invention in a manner that allows expression of that siNA molecule. The expression vector comprises in one embodiment; a) a transcription initiation region; b) a transcription termination region; and c) a nucleic acid sequence encoding at least one strand of the siNA molecule, wherein the sequence is operably linked to the initiation region and the termination region in a manner that allows expression and/or delivery of the siNA molecule.

[0300] In another embodiment the expression vector comprises: a) a transcription initiation region; b) a transcription termination region; c) an open reading frame; and d) a nucleic acid sequence encoding at least one strand of a siNA molecule, wherein the sequence is operably linked to the 3′-end of the open reading frame and wherein the sequence is operably linked to the initiation region, the open reading frame and the termination region in a manner that allows expression and/or delivery of the siNA molecule. In yet another embodiment, the expression vector comprises: a) a transcription initiation region; b) a transcription termination region; c) an intron; and d) a nucleic acid sequence encoding at least one siNA molecule, wherein the sequence is operably linked to the initiation region, the intron and the termination region in a manner which allows expression and/or delivery of the nucleic acid molecule.

[0301] In another embodiment, the expression vector comprises: a) a transcription initiation region; b) a transcription termination region; c) an intron; d) an open reading frame; and e) a nucleic acid sequence encoding at least one strand of a siNA molecule, wherein the sequence is operably linked to the 3′-end of the open reading frame and wherein the sequence is operably linked to the initiation region, the intron, the open reading frame and the termination region in a manner which allows expression and/or delivery of the siNA molecule.

### MAP Kinase Biology and Biochemistry

[0302] The mitogen-activated protein kinases (MAPKs) have been at the forefront of a rapid advance in the understanding of cellular events in growth factor and cytokine receptor signaling. The MAP kinases (also referred to as extracellular signal-regulated protein kinases, or ERKs) are the terminal enzymes in a three-kinase cascade. The reiteration of three-kinase cascades for related but distinct signaling pathways gave rise to the concept of a MAPK pathway as a modular, multifunctional signaling element that acts sequentially within one pathway, where each enzyme phosphorylates and thereby activates the next member in the sequence. A typical MAPK pathway thus consists of three protein kinases: a MAPK kinase kinase (or MEKK) that activates a MAPK kinase (or MEK) which, in turn, activates a MAPK/ERK enzyme. Each of the MAPK/ERK, JNK and p38 cascades consists of a three-enzyme module that includes MEKK, MEK and an ERK or MAPK superfamily member. A variety of extracellular signals triggers initial events upon association with their respective cell surface receptors and this signal is then transmitted to the interior of the cell where it activates the appropriate cascades (see for example FIG. 12).

[0303] The identification of distinct MAPK cascades that are conserved across all eukaryotes indicates that the MAPK module has been adapted for interpretation of a diverse array of extracellular signals. Although mitogen activation of the MAPK subfamily (e.g., ERK1 and ERK2) has dominated efforts to understand MAPK signaling, increasing appreciation of the role of the stress-activated kinases, JNK and p38, illustrates the diverse nature of the MAPK superfamily of enzymes. Although sequence similarities among components of the individual MAPK modules used for activation of ERK1/2, JNKs and p38 are considerable, the fidelity that is maintained in order to translate specific extracellular signals into discrete physiological responses illustrates the selective adaptation of each MAPK pathway. The MAPK superfamily of enzymes is a critical component cellular regulative processes that coordinates incoming signals generated by a variety of extracellular and intracellular mediators. Specific phosphorylation and activation of enzymes in the MAPK pathway transmits the signal down the cascade, resulting in phosphorylation of many proteins with substantial regulatory functions throughout the cell, including other protein kinases, transcription factors, cytoskeletal proteins and other enzymes. The diversity of signals that culminates in MAPK activation indicates that these enzymes are not dedicated to regulation of any single growth factor, hormone or cytokine system. Instead, MAPKs—like cAMP-dependent protein kinase (PKA) and Ca²⁺- and phospholipid-dependent protein kinases (PKC) serve many signaling purposes. Because activation of the MAPK pathways are triggered to varying extents by a large number of receptor systems, temporal and spatial differences are critical to determining ligand- and cell-type-specific functions.

[0304] Following activation of cells with an appropriate extracellular stimuli, the signal is transmitted to the canonical MAPK module comprising three protein kinases. The progression of events for each enzyme cascade is the same, although specific isoforms of each enzyme appear to confer the required specificity within each pathway. The first enzyme in the module is a MEKK enzyme, of which Raf and its isoforms are one example. The MEKK enzymes comprise Ser/Thr protein kinases that activate the MEK enzymes by phosphorylating two serine or threonine residues within a Ser-X-X-X-Ser/Thr motif. Once activated, the MEK enzymes, which are hybrid function Ser/Thr/Tyr protein kinases, phosphorylate the MAPK/ERK enzymes on Thr and Tyr residues within the Thr-X-Tyr (TXY) consensus sequence. A critical and common feature of the MAPK superfamily of enzymes is that they are activated upon dual phosphorylation within a TXY consensus sequence present in the activation loop of the catalytic domain. The central amino acid differs for each MAPK superfamily member, corresponding to Glu for ERK1/2, Gly for p38/HOG and Pro for JNK/SAPK, although MEK specificity is not limited to these particular residues. Phosphorylation at only one of the two positions does not appear to activate the enzyme, although it may prime the kinase domain for receipt of the second phosphorylation event.

[0305] ERK1 and ERK2 were the first members of the MAPK superfamily whose cDNAs were cloned and the signaling cascades that lead to their activation characterized. Potent activation of ERK1 and ERK2 can be initiated through activation of transmembrane receptors with intrinsic protein tyrosine kinase (PTK) activity. Binding of extracellular ligands to their respective cell surface receptors results in receptor autophosphorylation and enhanced PTK activity. The subsequent association of the Src homology 2 (SH2) domains of adaptor proteins such as Grb2 and Shc with the autophosphorylated receptors, or with additional docking proteins, provides the molecular interactions that bring the required signal transduction molecules into close proximity with each other. Receptors without intrinsic PTK activity but which comprise sites for tyrosine phosphorylation can also activate the cascade via association of their phosphotyrosine residues with adaptor molecules. For example, the SH3 domain of Grb2 binds a proline-rich region of the guanine nucleotide-exchange protein SOS which, in turn, increases the association of Ras with GTP. The GTP-bound form of Ras binds to Raf (a MAPK kinase) isoforms, including C-Raf-1, B-Raf and A-Raf. This action targets Raf to the membrane, where its protein kinase activity is increased by phosphorylation. MAPK kinases (MEK1 and MEK2), are phosphorylated and activated by Raf. MEK1 and MEK2 are dual-specificity protein kinases that dually phosphorylate the ERK enzymes (corresponding to Thr¹⁸³ and Tyr¹⁸⁵ of p42ERK2), thereby increasing their enzymatic activity by approximately 1,000-fold over the activity found with the basal or monophosphorylated forms. Phosphorylation of these residues causes closure of the kinase active site and induces conformational changes necessary for high activity.

[0306] MAPK mutants, lacking either a lysine required for catalytic activity or the prerequisite TXY phosphorylation sites, can inhibit signaling by the native enzymes in cells. In the case of ERK1 and ERK2, these mutants have been used with repeated success. For example, mutant ERK2 completely blocks proliferation in response to epidermal growth factor (EGF) and v-Raf, and partially blocks induction by serum or small t antigen. ERK1 antisense mRNA and an ERK1 phosphorylation site mutants interfere with thrombin-induced transcription as well as serum-dependent proliferation. These findings suggest an essential role in proliferation and transformation for the ERK/MAPK pathway.

[0307] The JNK/SAPK and p38/HOG pathways are activated by ultraviolet light, cytokines, osmotic shock, inhibitors of DNA, RNA, and protein synthesis, and to a lesser extent by certain growth factors. This spectrum of regulators suggests that the enzymes are transducers of a variety of cellular stress responses. In contrast to activation of ERK1 and ERK2, upstream signal transduction mechanisms for the JNK and p38 cascades are less well understood. When transfected into mammalian cells, a diverse group of protein kinases including the mixed lineage kinases (MLKs) and relatives of the yeast Step 20p, such as the p21-activated kinases (PAKs) and germinal center kinase (GCK), cause activation of JNK/SAPK. Similarly, GTP-bound forms of the small GTP-binding proteins, Rac and Cdc42, activate the JNK/SAPK pathway and, to a lesser extent, the p38 pathway. Direct activation of both pathways by PAKs also has been demonstrated, suggesting that PAKs can be the relevant effectors for these small G proteins. The PAKs are homologs of the yeast kinases Step 20p and Shk1, enzymes upstream of the MAPK modules in yeast pheromone response pathways. Both yeast and mammalian protein kinases contain a binding site for Rac/Cdc42 and share the property of being activated in vitro through association with these small G proteins when in their GTP-bound states. In yeast, Step 20p is thought to phosphorylate and activate the MEKK isoform Ste11p, suggesting that MEKKs may be PAK targets. This summary of MAP kinase pathways has been adapted from Cobb and Schaefer, 1996, Promega Notes Magazine Number 59, page 37.

[0308] The regulation of c-Jun transcriptional activity by Jun N-terminal kinase (JNK), ERK1, ERK2, and p38 kinases has become a paradigm for the understanding of how mitogen-activated protein (MAP) kinase signaling pathways elicit specific changes in gene transcription through selective phosphorylation of nuclear transcription factors. Selective phosphorylation of c-Jun by JNK is detected by a specific docking motif in c-Jun, the delta region, which enables JNK to physically interact with c-Jun. Analogous MAP kinase docking motifs have subsequently been found in several other transcription factors, indicating that this is a general mechanism for ensuring the specificity of signal transduction. Furthermore, genetic and biochemical studies in mice, flies and cultured cells have provided evidence that signals relayed by JNK through c-Jun regulate a wide range of cellular processes including cell proliferation, tumorigenesis, apoptosis and embryonic development. Despite these advances, in most cases, the genes or programs of gene expression downstream of JNK and c-Jun, which control these processes, have yet to be defined. One important process that is associated with JNK gene expression is the development of insulin resistance in obese subjects.

[0309] Obesity is closely associated with insulin resistance and establishes the leading risk factor for type 2 diabetes mellitus in mammals. The c-Jun amino-terminal kinases (JNKs) can interfere with insulin activity in cultured cells and are activated by inflammatory cytokines and free fatty acids molecules that have been implicated in the development of type 2 diabetes. Hirosumi et al, 2002, Nature, 420, 333-336, demonstrate that JNK activity is abnormally elevated in obesity. Furthermore, Hirosumi et al, supra have shown that an absence of JNK1 results in decreased adiposity with significantly improved insulin sensitivity and enhanced insulin receptor capacity in two different models of mouse obesity. Thus, JNK is a crucial mediator of obesity and insulin resistance and as such, provides a potential target for nucleic acid based therapeutics that modulate JNK gene expression.

[0310] The transcription factor and oncogene, c-JUN, is implicated in several critical cell processes including cell proliferation, cell survival, and oncogenic transformation. Although it is broadly expressed in a wide variety of cell types, it plays an especially important role in hepatocytes. However, the precise role played by c-JUN in hepatocytes seems to depend on the differentiation state of this cell type. Adult differentiated hepatocytes depend on c-JUN for progression through the cell cycle. Deletion of c-JUN reduces the proliferation capacity of hepatocytes following partial hepatectomy. c-JUN is thought to be major component in the development of human hepatocellular carcinoma (HCC). HCC is the most common form of primary liver cancer. Chronic HCV infection is a major risk factor for HCC.

[0311] The role of c-JUN in liver cancer has recently been investigated (Eferl et al., 2003, Cell, 112, 181). These investigators deleted c-JUN and then induced liver cancer by chemical carcinogenesis. They observed that deletion of c-JUN dramatically interfered with liver tumor formation. Animal survival was markedly worse in c-JUN wild-type animals relative to deletion mutants. In particular, the number of apoptotic cells increased about five fold in tumors in the c-JUN deletion strain relative to the wild-type animals. Importantly, levels of the pro-apoptotic gene products such as p53 and noxa were elevated in the c-JUN deletion strain. c-JUN is likely to antagonize other pro-apoptotic genes such as TNF-a. Thus, by blocking p53 and its large family of dependent genes, c-JUN seems to promote tumor formation. Since a large fraction of chronically infected HCV patients develop hepatocellular carcinoma, c-JUN provides an attractive target for treating HCV infected patients to prevent or ameliorate hepatocellular carcinoma.

[0312] Based upon the current understanding of MAP kinase pathways, the modulation of MAP kinase pathways is instrumental in the development of new therapeutics in, for example, the fields of inflammation, oncology, and metabolism. As such, modulation of a specific MAP kinase pathway using small interfering nucleic acid (siNA) mediated RNAi represents a novel approach to the treatment and study of diseases and conditions related to a specific MAP kinase activity and/or gene expression.

### EXAMPLES

[0313] The following are non-limiting examples showing the selection, isolation, synthesis and activity of nucleic acids of the instant invention.

### Example 1

### Tandem Synthesis of siNA Constructs

[0314] Exemplary siNA molecules of the invention are synthesized in tandem using a cleavable linker, for example, a succinyl-based linker. Tandem synthesis as described herein is followed by a one-step purification process that provides RNAi molecules in high yield. This approach is highly amenable to siNA synthesis in support of high throughput RNAi screening, and can be readily adapted to multi-column or multi-well synthesis platforms.

[0315] After completing a tandem synthesis of a siNA oligo and its complement in which the 5′-terminal dimethoxytrityl (5′-O-DMT) group remains intact (trityl on synthesis), the oligonucleotides are deprotected as described above. Following deprotection, the siNA sequence strands are allowed to spontaneously hybridize. This hybridization yields a duplex in which one strand has retained the 5′-O-DMT group while the complementary strand comprises a terminal 5′-hydroxyl. The newly formed duplex behaves as a single molecule during routine solid-phase extraction purification (Trityl-On purification) even though only one molecule has a dimethoxytrityl group. Because the strands form a stable duplex, this dimethoxytrityl group (or an equivalent group, such as other trityl groups or other hydrophobic moieties) is all that is required to purify the pair of oligos, for example, by using a C18 cartridge.

[0316] Standard phosphoramidite synthesis chemistry is used up to the point of introducing a tandem linker, such as an inverted deoxy abasic succinate or glyceryl succinate linker (see FIG. 1) or an equivalent cleavable linker. A non-limiting example of linker coupling conditions that can be used includes a hindered base such as diisopropylethylamine (DIPA) and/or DMAP in the presence of an activator reagent such as Bromotripyrrolidinophosphoniumhexafluororophosphate (PyBrOP). After the linker is coupled, standard synthesis chemistry is utilized to complete synthesis of the second sequence leaving the terminal the 5′-O-DMT intact. Following synthesis, the resulting oligonucleotide is deprotected according to the procedures described herein and quenched with a suitable buffer, for example with 50 mM NaOAc or 1.5M NH₄H₂CO₃.

[0317] Purification of the siNA duplex can be readily accomplished using solid phase extraction, for example using a Waters C18 SepPak Ig cartridge conditioned with 1 column volume (CV) of acetonitrile, 2 CV H₂O, and 2 CV 50 mM NaOAc. The sample is loaded and then washed with 1 CV H₂O or 50 mM NaOAc. Failure sequences are eluted with 1 CV 14% ACN (Aqueous with 50 mM NaOAc and 50 mM NaCl). The column is then washed, for example with 1 CV H₂O followed by on-column detritylation, for example by passing 1 CV of 1% aqueous trifluoroacetic acid (TFA) over the column, then adding a second CV of 1% aqueous TFA to the column and allowing to stand for approximately 10 minutes. The remaining TFA solution is removed and the column washed with H₂O followed by 1 CV 1M NaCl and additional H₂O. The siNA duplex product is then eluted, for example, using 1 CV 20% aqueous CAN.

[0318] FIG. 2 provides an example of MALDI-TOF mass spectrometry analysis of a purified siNA construct in which each peak corresponds to the calculated mass of an individual siNA strand of the siNA duplex. The same purified siNA provides three peaks when analyzed by capillary gel electrophoresis (CGE), one peak presumably corresponding to the duplex siNA, and two peaks presumably corresponding to the separate siNA sequence strands. Ion exchange HPLC analysis of the same siNA contract only shows a single peak. Testing of the purified siNA construct using a luciferase reporter assay described below demonstrated the same RNAi activity compared to siNA constructs generated from separately synthesized oligonucleotide sequence strands.

### Example 2

### Identification of Potential siNA Target Sites in Any RNA Sequence

[0319] The sequence of an RNA target of interest, such as a viral or human mRNA transcript, is screened for target sites, for example by using a computer folding algorithm. In a non-limiting example, the sequence of a gene or RNA gene transcript derived from a database, such as Genbank, is used to generate siNA targets having complementarity to the target. Such sequences can be obtained from a database, or can be determined experimentally as known in the art. Target sites that are known, for example, those target sites determined to be effective target sites based on studies with other nucleic acid molecules, for example ribozymes or antisense, or those targets known to be associated with a disease or condition such as those sites containing mutations or deletions, can be used to design siNA molecules targeting those sites. Various parameters can be used to determine which sites are the most suitable target sites within the target RNA sequence. These parameters include but are not limited to secondary or tertiary RNA structure, the nucleotide base composition of the target sequence, the degree of homology between various regions of the target sequence, or the relative position of the target sequence within the RNA transcript. Based on these determinations, any number of target sites within the RNA transcript can be chosen to screen siNA molecules for efficacy, for example by using in vitro RNA cleavage assays, cell culture, or animal models. In a non-limiting example, anywhere from 1 to 1000 target sites are chosen within the transcript based on the size of the siNA construct to be used. High throughput screening assays can be developed for screening siNA molecules using methods known in the art, such as with multi-well or multi-plate assays to determine efficient reduction in target gene expression.

### Example 3

### Selection of siNA Molecule Target Sites in a RNA

[0320] The following non-limiting steps can be used to carry out the selection of siNAs targeting a given gene sequence or transcript.

[0321] 1. The target sequence is parsed in silico into a list of all fragments or subsequences of a particular length, for example 23 nucleotide fragments, contained within the target sequence. This step is typically carried out using a custom Perl script, but commercial sequence analysis programs such as Oligo, MacVector, or the GCG Wisconsin Package can be employed as well.

[0322] 2. In some instances the siNAs correspond to more than one target sequence; such would be the case for example in targeting different transcripts of the same gene, targeting different transcripts of more than one gene, or for targeting both the human gene and an animal homolog. In this case, a subsequence list of a particular length is generated for each of the targets, and then the lists are compared to find matching sequences in each list. The subsequences are then ranked according to the number of target sequences that contain the given subsequence; the goal is to find subsequences that are present in most or all of the target sequences. Alternately, the ranking can identify subsequences that are unique to a target sequence, such as a mutant target sequence. Such an approach would enable the use of siNA to target specifically the mutant sequence and not effect the expression of the normal sequence.

[0323] 3. In some instances the siNA subsequences are absent in one or more sequences while present in the desired target sequence; such would be the case if the siNA targets a gene with a paralogous family member that is to remain untargeted. As in case 2 above, a subsequence list of a particular length is generated for each of the targets, and then the lists are compared to find sequences that are present in the target gene but are absent in the untargeted paralog.

[0324] 4. The ranked siNA subsequences can be further analyzed and ranked according to GC content. A preference can be given to sites containing 30-70% GC, with a further preference to sites containing 40-60% GC.

[0325] 5. The ranked siNA subsequences can be further analyzed and ranked according to self-folding and internal hairpins. Weaker internal folds are preferred; strong hairpin structures are to be avoided.

[0326] 6. The ranked siNA subsequences can be further analyzed and ranked according to whether they have runs of GGG or CCC in the sequence. GGG (or even more Gs) in either strand can make oligonucleotide synthesis problematic and can potentially interfere with RNAi activity, so it is avoided whenever better sequences are available. CCC is searched in the target strand because that will place GGG in the antisense strand.

[0327] 7. The ranked siNA subsequences can be further analyzed and ranked according to whether they have the dinucleotide UU (uridine dinucleotide) on the 3′-end of the sequence, and/or AA on the 5′-end of the sequence (to yield 3′ UU on the antisense sequence). These sequences allow one to design siNA molecules with terminal TT thymidine dinucleotides.

[0328] 8. Four or five target sites are chosen from the ranked list of subsequences as described above. For example, in subsequences having 23 nucleotides, the right 21 nucleotides of each chosen 23-mer subsequence are then designed and synthesized for the upper (sense) strand of the siNA duplex, while the reverse complement of the left 21 nucleotides of each chosen 23-mer subsequence are then designed and synthesized for the lower (antisense) strand of the siNA duplex (see Tables II and III). If terminal TT residues are desired for the sequence (as described in paragraph 7), then the two 3′ terminal nucleotides of both the sense and antisense strands are replaced by TT prior to synthesizing the oligos.

[0329] 9. The siNA molecules are screened in an in vitro, cell culture or animal model system to identify the most active siNA molecule or the most preferred target site within the target RNA sequence.

[0330] In an alternate approach, a pool of siNA constructs specific to a MAP kinase target sequence is used to screen for target sites in cells expressing MAP kinase (e.g., c-JUN) RNA, such as human kidney fibroblast (e.g., 293 cells), HeLa, or HepG2 cells. The general strategy used in this approach is shown in FIG. 9. A non-limiting example of such as pool is a pool comprising sequences having sense sequences comprising SEQ ID NOs. 1247-1427 and antisense sequences comprising SEQ ID NOs. 1428-1608 respectively. 293, HeLa, or HepG2 cells expressing MAP kinase (e.g., c-JUN) are transfected with the pool of siNA constructs and cells that demonstrate a phenotype associated with MAP kinase (e.g., c-JUN) inhibition are sorted. The pool of siNA constructs can be expressed from transcription cassettes inserted into appropriate vectors (see for example FIG. 7 and FIG. 8). The siNA from cells demonstrating a positive phenotypic change (e.g., decreased proliferation, decreased MAP kinase (e.g., c-JUN) mRNA levels or decreased MAP kinase (e.g., c-JUN) protein expression), are sequenced to determine the most suitable target site(s) within the target MAP kinase (e.g., c-JUN) RNA sequence.

### Example 4

### MAP Kinase Targeted siNA Design

[0331] siNA target sites were chosen by analyzing sequences of the MAP kinase (e.g., c-JUN) RNA target and optionally prioritizing the target sites on the basis of folding (structure of any given sequence analyzed to determine siNA accessibility to the target), by using a library of siNA molecules as described in Example 3, or alternately by using an in vitro siNA system as described in Example 6 herein. siNA molecules were designed that could bind each target and are optionally individually analyzed by computer folding to assess whether the siNA molecule can interact with the target sequence. Varying the length of the siNA molecules can be chosen to optimize activity. Generally, a sufficient number of complementary nucleotide bases are chosen to bind to, or otherwise interact with, the target RNA, but the degree of complementarity can be modulated to accommodate siNA duplexes or varying length or base composition. By using such methodologies, siNA molecules can be designed to target sites within any known RNA sequence, for example those RNA sequences corresponding to the any gene transcript.

[0332] Chemically modified siNA constructs are designed to provide nuclease stability for systemic administration in vivo and/or improved pharmacokinetic, localization, and delivery properties while preserving the ability to mediate RNAi activity. Chemical modifications as described herein are introduced synthetically using synthetic methods described herein and those generally known in the art. The synthetic siNA constructs are then assayed for nuclease stability in serum and/or cellular/tissue extracts (e.g. liver extracts). The synthetic siNA constructs are also tested in parallel for RNAi activity using an appropriate assay, such as a luciferase reporter assay as described herein or another suitable assay that can quantity RNAi activity. Synthetic siNA constructs that possess both nuclease stability and RNAi activity can be further modified and re-evaluated in stability and activity assays. The chemical modifications of the stabilized active siNA constructs can then be applied to any siNA sequence targeting any chosen RNA and used, for example, in target screening assays to pick lead siNA compounds for therapeutic development (see for example FIG. 11).

### Example 5

### Chemical Synthesis and Purification of siNA

[0333] siNA molecules can be designed to interact with various sites in the RNA message, for example, target sequences within the RNA sequences described herein. The sequence of one strand of the siNA molecule(s) is complementary to the target site sequences described above. The siNA molecules can be chemically synthesized using methods described herein. Inactive siNA molecules that are used as control sequences can be synthesized by scrambling the sequence of the siNA molecules such that it is not complementary to the target sequence. Generally, siNA constructs can by synthesized using solid phase oligonucleotide synthesis methods as described herein (see for example Usman et al., U.S. Pat. Nos. 5,804,683; 5,831,071; 5,998,203; 6,117,657; 6,353,098; 6,362,323; 6,437,117; 6,469,158; Scaringe et al., U.S. Pat. Nos. 6,111,086; 6,008,400; 6,111,086 all incorporated by reference herein in their entirety).

[0334] In a non-limiting example, RNA oligonucleotides are synthesized in a stepwise fashion using the phosphoramidite chemistry as is known in the art. Standard phosphoramidite chemistry involves the use of nucleosides comprising any of 5′-O-dimethoxytrityl, 2′-O-tert-butyldimethylsilyl, 3′-O-2-Cyanoethyl N,N-diisopropylphosphoroamidite groups, and exocyclic amine protecting groups (e.g. N6-benzoyl adenosine, N4 acetyl cytidine, and N2-isobutyryl guanosine). Alternately, 2′-O-Silyl Ethers can be used in conjunction with acid-labile 2′-O-orthoester protecting groups in the synthesis of RNA as described by Scaringe supra. Differing 2′ chemistries can require different protecting groups, for example 2′-deoxy-2′-amino nucleosides can utilize N-phthaloyl protection as described by Usman et al., U.S. Pat. No. 5,631,360, incorporated by reference herein in its entirety).

[0335] During solid phase synthesis, each nucleotide is added sequentially (3′- to 5′-direction) to the solid support-bound oligonucleotide. The first nucleoside at the 3′-end of the chain is covalently attached to a solid support (e.g., controlled pore glass or polystyrene) using various linkers. The nucleotide precursor, a ribonucleoside phosphoramidite, and activator are combined resulting in the coupling of the second nucleoside phosphoramidite onto the 5′-end of the first nucleoside. The support is then washed and any unreacted 5′-hydroxyl groups are capped with a capping reagent such as acetic anhydride to yield inactive 5′-acetyl moieties. The trivalent phosphorus linkage is then oxidized to a more stable phosphate linkage. At the end of the nucleotide addition cycle, the 5′-O-protecting group is cleaved under suitable conditions (e.g., acidic conditions for trityl-based groups and Fluoride for silyl-based groups). The cycle is repeated for each subsequent nucleotide.

[0336] Modification of synthesis conditions can be used to optimize coupling efficiency, for example by using differing coupling times, differing reagent/phosphoramidite concentrations, differing contact times, differing solid supports and solid support linker chemistries depending on the particular chemical composition of the siNA to be synthesized. Deprotection and purification of the siNA can be performed as is generally described in Deprotection and purification of the siNA can be performed as is generally described in Usman et al., U.S. Pat. No. 5,831,071, U.S. Pat. No. 6,353,098, U.S. Pat. No. 6,437,117, and Bellon et al., U.S. Pat. No. 6,054,576, U.S. Pat. No. 6,162,909, U.S. Pat. No. 6,303,773, or Scaringe supra, incorporated by reference herein in their entireties. Additionally, deprotection conditions can be modified to provide the best possible yield and purity of siNA constructs. For example, applicant has observed that oligonucleotides comprising 2′-deoxy-2′-fluoro nucleotides can degrade under inappropriate deprotection conditions. Such oligonucleotides are deprotected using aqueous methylamine at about 35° C. for 30 minutes. If the 2′-deoxy-2′-fluoro containing oligonucleotide also comprises ribonucleotides, after deprotection with aqueous methylamine at about 35° C. for 30 minutes, TEA-HF is added and the reaction maintained at about 65° C. for an additional 15 minutes.

### Example 6

### RNAi In Vitro Assay to Assess siNA Activity

[0337] An in vitro assay that recapitulates RNAi in a cell-free system is used to evaluate siNA constructs targeting MAP kinase (e.g., c-JUN) RNA targets. The assay comprises the system described by Tuschl et al., 1999, Genes and Development, 13, 3191-3197 and Zamore et al., 2000, Cell, 101, 25-33 adapted for use with MAP kinase target RNA. A Drosophila extract derived from syncytial blastoderm is used to reconstitute RNAi activity in vitro. Target RNA is generated via in vitro transcription from an appropriate MAP kinase expressing plasmid using T7 RNA polymerase or via chemical synthesis as described herein. Sense and antisense siNA strands (for example 20 uM each) are annealed by incubation in buffer (such as 100 mM potassium acetate, 30 mM HEPES-KOH, pH 7.4, 2 mM magnesium acetate) for 1 minute at 90° C. followed by 1 hour at 37° C., then diluted in lysis buffer (for example 100 mM potassium acetate, 30 mM HEPES-KOH at pH 7.4, 2 mM magnesium acetate). Annealing can be monitored by gel electrophoresis on an agarose gel in TBE buffer and stained with ethidium bromide. The Drosophila lysate is prepared using zero to two-hour-old embryos from Oregon R flies collected on yeasted molasses agar that are dechorionated and lysed. The lysate is centrifuged and the supernatant isolated. The assay comprises a reaction mixture containing 50% lysate [vol/vol], RNA (10-50 μM final concentration), and 10% [vol/vol] lysis buffer containing siNA (10 nM final concentration). The reaction mixture also contains 10 mM creatine phosphate, 10 ug/ml creatine phosphokinase, 100 um GTP, 100 uM UTP, 100 uM CTP, 500 uM ATP, 5 mM DTT, 0.1 U/uL RNasin (Promega), and 100 uM of each amino acid. The final concentration of potassium acetate is adjusted to 100 mM. The reactions are pre-assembled on ice and preincubated at 25° C. for 10 minutes before adding RNA, then incubated at 25° C. for an additional 60 minutes. Reactions are quenched with 4 volumes of 1.25× Passive Lysis Buffer (Promega). Target RNA cleavage is assayed by RT-PCR analysis or other methods known in the art and are compared to control reactions in which siNA is omitted from the reaction.

[0338] Alternately, internally-labeled target RNA for the assay is prepared by in vitro transcription in the presence of [alpha-³²P] CTP, passed over a G 50 Sephadex column by spin chromatography and used as target RNA without further purification. Optionally, target RNA is 5′-³²P-end labeled using T4 polynucleotide kinase enzyme. Assays are performed as described above and target RNA and the specific RNA cleavage products generated by RNAi are visualized on an autoradiograph of a gel. The percentage of cleavage is determined by Phosphor Inager® quantitation of bands representing intact control RNA or RNA from control reactions without siNA and the cleavage products generated by the assay.

[0339] In one embodiment, this assay is used to determine target sites the MAP kinase RNA target for siNA mediated RNAi cleavage, wherein a plurality of siNA constructs are screened for RNAi mediated cleavage of the MAP kinase RNA target, for example, by analyzing the assay reaction by electrophoresis of labeled target RNA, or by northern blotting, as well as by other methodology well known in the art.

### Example 7

### Nucleic Acid Inhibition of MAP Kinase Target RNA In Vivo

[0340] siNA molecules targeted to the human MAP kinase (e.g., c-JUN) RNA are designed and synthesized as described above. These nucleic acid molecules can be tested for cleavage activity in vivo, for example, using the following procedure. The target sequences and the nucleotide location within the MAP kinase (e.g., c-JUN) RNA are given in Table II and III.

[0341] Two formats are used to test the efficacy of siNAs targeting MAP kinase (e.g., c-JUN). First, the reagents are tested in cell culture, for example using cultured human kidney fibroblast cells (e.g., 293, HeLa, or HepG2 cells), to determine the extent of RNA and protein inhibition. siNA reagents (e.g.; see Tables II and III) are selected against the MAP kinase (e.g., c-JUN) target as described herein. RNA inhibition is measured after delivery of these reagents by a suitable transfection agent to, for example, 293, HeLa, or HepG2 cells. Relative amounts of target RNA are measured versus actin using real-time PCR monitoring of amplification (eg., ABI 7700 Taqman®). A comparison is made to a mixture of oligonucleotide sequences made to unrelated targets or to a randomized siNA control with the same overall length and chemistry, but randomly substituted at each position. Primary and secondary lead reagents are chosen for the target and optimization performed. After an optimal transfection agent concentration is chosen, a RNA time-course of inhibition is performed with the lead siNA molecule. In addition, a cell-plating format can be used to determine RNA inhibition.

Delivery of siNA to Cells

[0342] Cells (e.g., 293, HeLa, or HepG2 cells) are seeded, for example, at 1×10⁵ cells per well of a six-well dish in EGM-2 (BioWhittaker) the day before transfection. siNA (final concentration, for example 20 nM) and cationic lipid (e.g., final concentration 2 μg/ml) are complexed in EGM basal media (BioWhittaker) at 37° C. for 30 mins in polystyrene tubes. Following vortexing, the complexed siNA is added to each well and incubated for the times indicated. For initial optimization experiments, cells are seeded, for example, at 1×10³ in 96 well plates and siNA complex added as described. Efficiency of delivery of siNA to cells is determined using a fluorescent siNA complexed with lipid. Cells in 6-well dishes are incubated with siNA for 24 hours, rinsed with PBS and fixed in 2% paraformaldehyde for 15 minutes at room temperature. Uptake of siNA is visualized using a fluorescent microscope.

Taqman and Lightcycler Quantification of mRNA

[0343] Total RNA is prepared from cells following siNA delivery, for example using Qiagen RNA purification kits for 6-well or Rneasy extraction kits for 96-well assays. For Taqman analysis, dual-labeled probes are synthesized with the reporter dye, FAM or JOE, covalently linked at the 5′-end and the quencher dye TAMRA conjugated to the 3′-end. One-step RT-PCR amplifications are performed on, for example, an ABI PRISM 7700 Sequence Detector using 50 μl reactions consisting of 10 μl total RNA, 100 nM forward primer, 900 nM reverse primer, 100 nM probe, 1×TaqMan PCR reaction buffer (PE-Applied Biosystems), 5.5 mM MgCl₂, 300 mM each dATP, dCTP, dGTP, and dTTP, 10U RNase Inhibitor (Promega), 1.25U AmpliTaq Gold (PE-Applied Biosystems) and 10U M-MLV Reverse Transcriptase (Promega). The thermal cycling conditions can consist of 30 min at 48° C., 10 min at 95° C., followed by 40 cycles of 15 sec at 95° C. and 1 min at 60° C. Quantitation of mRNA levels is determined relative to standards generated from serially diluted total cellular RNA (300, 100, 33, 11 ng/r×n) and normalizing to β-actin or GAPDH mRNA in parallel TaqMan reactions. For each gene of interest an upper and lower primer and a fluorescently labeled probe are designed. Real time incorporation of SYBR Green I dye into a specific PCR product can be measured in glass capillary tubes using a lightcyler. A standard curve is generated for each primer pair using control c RNA allularnd values are represented as relative expression to GAPDH in each sample.

### Western Blotting

[0344] Nuclear extracts can be prepared using a standard micro preparation technique (see for example Andrews and Faller, 1991, Nucleic Acids Research, 19, 2499). Protein extracts from supernatants are prepared, for example using TCA precipitation. An equal volume of 20% TCA is added to the cell supernatant, incubated on ice for 1 hour and pelleted by centrifugation for 5 minutes. Pellets are washed in acetone, dried and resuspended in water. Cellular protein extracts are run on a 10% Bis-Tris NuPage (nuclear extracts) or 4-12% Tris-Glycine (supernatant extracts) polyacrylamide gel and transferred onto nitro-cellulose membranes. Non-specific binding can be blocked by incubation, for example, with 5% non-fat milk for 1 hour followed by primary antibody for 16 hour at 4° C. Following washes, the secondary antibody is applied, for example (1:10,000 dilution) for 1 hour at room temperature and the signal detected with SuperSignal reagent (Pierce).

### Example 8

### Models Useful to Evaluate the Down-Regulation of MAP Kinase Gene (e.g., c-JUN, ERK1, ERK2, JNK1, JNK2, and/or p38) expression

### Cell Culture

[0345] There are numerous cell culture systems that can be used to analyze reduction of MAP kinase levels either directly or indirectly by measuring downstream effects. For example, cultured human kidney fibroblast cells (e.g., 293 cells), HeLa, or HepG2 cells can be used in cell culture experiments to assess the efficacy of nucleic acid molecules of the invention. As such, cells treated with nucleic acid molecules of the invention (e.g., siNA) targeting MAP kinase RNA would be expected to have decreased MAP kinase expression capacity compared to matched control nucleic acid molecules having a scrambled or inactive sequence. In a non-limiting example, 293, HeLa, or HepG2 cells are cultured and MAP kinase expression is quantified, for example by time-resolved immuno fluorometric assay. MAP kinase messenger-RNA expression is quantitated with RT-PCR in cultured cells. Untreated cells are compared to cells treated with siNA molecules transfected with a suitable reagent, for example a cationic lipid such as lipofectamine, and MAP kinase protein and RNA levels are quantitated. Dose response assays are then performed to establish dose dependent inhibition of MAP kinase expression. In another non-limiting example, cell culture experiments are carried out as described by Aguirre et al., 2000, J. Biol. Chem., 275, 9047-9054.

[0346] In several cell culture systems, cationic lipids have been shown to enhance the bioavailability of oligonucleotides to cells in culture (Bennet, et al., 1992, Mol. Pharmacology, 41, 1023-1033). In one embodiment, siNA molecules of the invention are complexed with cationic lipids for cell culture experiments. siNA and cationic lipid mixtures are prepared in serum-free DMEM immediately prior to addition to the cells. DMEM plus additives are warmed to room temperature (about 20-25° C.) and cationic lipid is added to the final desired concentration and the solution is vortexed briefly. siNA molecules are added to the final desired concentration and the solution is again vortexed briefly and incubated for 10 minutes at room temperature. In dose response experiments, the RNA/lipid complex is serially diluted into DMEM following the 10 minute incubation.

### Animal Models

[0347] Evaluating the efficacy of anti-MAP kinase agents in animal models is an important prerequisite to human clinical trials. Obesity and type 2 diabetes are the most prevalent and serious metabolic diseases in that they affect more than 50% of adults in the USA. These conditions are associated with a chronic inflammatory response characterized by abnormal inflammatory cytokine production, increased acute-phase reactants and other stress-induced molecules. Many of these alterations seem to be initiated and to reside within adipose tissue. Elevated production of tumor necrosis factor (TNF)-alpha by adipose tissue decreases sensitivity to insulin and has been detected in several experimental obesity models and obese humans. Free fatty acids (FFAs) are also implicated in the etiology of obesity-induced insulin resistance and diabetes. Because both TNF-alpha and FFAs are potent MAP kinase activators, Hirosumi et al., 2002, Nature, 420, 333-336 determined whether obesity is associated with alterations in stress-activated and inflammatory responses through this pathway and whether MAP kinases are causally linked to aberrant metabolic control in this state. In this study, Hirosumi et al., describe dietary and genetic (ob/ob) mouse models of obesity useful in evaluating MAP kinase gene expression. Such transgenic mice are useful as models for obesity and insulin resistance and can be used to identify nucleic acid molecules of the invention that modulate MAP kinase gene (e.g., ERK1, ERK2, JNK1, JNK2, and/or p38) expression and gene function toward therapeutic use in treating obesity and insulin resistance (e.g. type I and II diabetes).

[0348] The role of c-JUN in liver cancer has recently been investigated (Eferl et al., 2003, Cell, 112, 181). These investigators deleted c-JUN and then induced liver cancer by chemical carcinogenesis. They observed that deletion of c-JUN dramatically interfered with liver tumor formation. Animal survival was markedly worse in c-JUN wild-type animals relative to deletion mutants. In particular, the number of apoptotic cells increased about five fold in tumors in the c-JUN deletion strain relative to the wild-type animals. Importantly, levels of the pro-apoptotic gene products such as p53 and noxa were elevated in the c-JUN deletion strain. c-JUN is likely to antagonize other pro-apoptotic genes such as TNF-a. Thus, by blocking p53 and its large family of dependent genes, c-JUN seems to promote tumor formation. Since a large fraction of chronically infected HCV patients develop hepatocellular carcinoma, c-JUN provides an attractive target for treating HCV infected patients to prevent or ameliorate hepatocellular carcinoma. The animal model described by Eferl et al., supra, can be used to evaluate siNA molecules of the invention for efficacy in inhibiting c-JUN expression in liver toward therapeutic use in preventing and/or treating hepatocellular carcinoma in human subjects.

[0349] Because mitogen activated protein kinases (MAP kinases) are constituents of numerous signal transduction pathways, and are activated by protein kinase cascades, intense efforts are under way to develop and evaluate compounds that target components of MAPK pathways. Several of these inhibitors are effective in animal models of disease and have advanced to clinical trials for the treatment of inflammatory diseases, metabolic diseases, autoimmune diseases and cancer. The clinical utility of specifically targeting MAP kinase genes (e.g., c-JUN, ERK1, ERK2, JNK1, JNK2, and/or p38) can be studied in animal models and clinical studies of inflammatory diseases, metabolic diseases, autoimmune diseases and cancer (see for example English et al., 2002, Trends in Pharmacological Sciences, 23, 40-45).

### Example 9

### RNAi Mediated Inhibition of p38 RNA Expression

[0350] siNA constructs are tested for efficacy in reducing p38 RNA expression in, for example in A549 cells. Cells are plated approximately 24 hours before transfection in 96-well plates at 5,000-7,500 cells/well, 100 μl/well, such that at the time of transfection cells are 70-90% confluent. For transfection, annealed siNAs are mixed with the transfection reagent (Lipofectamine 2000, Invitrogen) in a volume of 50 μl/well and incubated for 20 minutes at room temperature. The siNA transfection mixtures are added to cells to give a final siNA concentration of 25 nM in a volume of 150 μl. Each siNA transfection mixture is added to 3 wells for triplicate siNA treatments. Cells are incubated at 37° for 24 hours in the continued presence of the siNA transfection mixture. At 24 hours, RNA is prepared from each well of treated cells. The supernatants with the transfection mixtures are first removed and discarded, then the cells are lysed and RNA prepared from each well. Target gene expression following treatment is evaluated by RT-PCR for the target gene and for a control gene (36B4, an RNA polymerase subunit) for normalization. The triplicate data is averaged and the standard deviations determined for each treatment. Normalized data are graphed and the percent reduction of target mRNA by active siNAs in comparison to their respective inverted control siNAs was determined.

[0351] In a non-limiting example, siNA constructs were screened for activity (see FIG. 12) and compared to untreated cells, scrambled siNA control constructs (Scram1 and Scram2), and cells transfected with lipid alone (transfection control). As shown in FIG. 12, the siNA constructs significantly reduce p38 RNA expression. Leads generated from such a screen are then further assayed. In a non-limiting example, siNA constructs comprising chemical modifications described herein (e.g., having modifications comprising Formulae I-VII and/or those modifications described in Table IV are assayed for activity. These siNA constructs are compared to appropriate matched chemistry inverted controls. In addition, the siNA constructs are also compared to untreated cells, cells transfected with lipid and scrambled siNA constructs, and cells transfected with lipid alone (transfection control).

### Example 10

### RNAi Mediated Inhibition of p38 RNA Expression

[0352] siNA constructs are tested for efficacy in reducing JNK1 RNA expression in, for example in A549 cells. Cells are plated approximately 24 hours before transfection in 96-well plates at 5,000-7,500 cells/well, 100 μl/well, such that at the time of transfection cells are 70-90% confluent. For transfection, annealed siNAs are mixed with the transfection reagent (Lipofectamine 2000, Invitrogen) in a volume of 50 μl/well and incubated for 20 minutes at room temperature. The siNA transfection mixtures are added to cells to give a final siNA concentration of 25 nM in a volume of 150 μl. Each siNA transfection mixture is added to 3 wells for triplicate siNA treatments. Cells are incubated at 37° for 24 hours in the continued presence of the siNA transfection mixture. At 24 hours, RNA is prepared from each well of treated cells. The supernatants with the transfection mixtures are first removed and discarded, then the cells are lysed and RNA prepared from each well. Target gene expression following treatment is evaluated by RT-PCR for the target gene and for a control gene (36B4, an RNA polymerase subunit) for normalization. The triplicate data is averaged and the standard deviations determined for each treatment. Normalized data are graphed and the percent reduction of target mRNA by active siNAs in comparison to their respective inverted control siNAs was determined.

[0353] In a non-limiting example, siNA constructs were screened for activity (see FIG. 13) and compared to untreated cells, scrambled siNA control constructs (Scram1 and Scram2), and cells transfected with lipid alone (transfection control). As shown in FIG. 13, the siNA constructs significantly reduce p38 RNA expression. Leads generated from such a screen are then further assayed. In a non-limiting example, siNA constructs comprise chemical modifications described herein (e.g., having modifications comprising Formulae I-VII and/or those modifications described in Table IV are assayed for activity). These siNA constructs are compared to appropriate matched chemistry inverted controls. In addition, the siNA constructs are also compared to untreated cells, cells transfected with lipid and scrambled siNA constructs, and cells transfected with lipid alone (transfection control).

### Example 11

### Indications

[0354] The present body of knowledge in MAP kinase research indicates the need for methods and compounds that can regulate MAP kinase gene (e.g., c-JUN, ERK1, ERK2, JNK1, JNK2, and/or p38) product expression for research, diagnostic, and therapeutic use. As described herein, the nucleic acid molecules of the present invention can be used to treat obesity and insulin resistance (e.g. type I and II diabetes), oncology and proliferation related indications and conditions, including cancers of the lung, bladder, colon, breast, prostate, retina, larynx, esophagus, liver (e.g., hepatocellular carcinoma), and ovary, along with lymphomas, melanomas and glioblastomas, inflammatory disorders such as asthma, septic shock, rheumatoid arthritis, psoriasis, inflammatory bowl syndrome and any other disease that responds to modulation of MAP kinase expression.

[0355] Troglitazone, insulin, and PTP-1B modulators are non-limiting examples of pharmaceutical agents that can be combined with or used in conjunction with the nucleic acid molecules (e.g. siNA molecules) of the instant invention for treating obesity and diabetes. The use of radiation treatments and chemotherapeutics such as Gemcytabine and cyclophosphamide are non-limiting examples of chemotherapeutic agents that can also be combined with or used in conjunction with the nucleic acid molecules (e.g. siNA molecules) of the instant invention for oncology therapeutic applications. Those skilled in the art will recognize that other anti-cancer compounds and therapies can be similarly be readily combined with the nucleic acid molecules of the instant invention (e.g. siNA molecules) and are hence within the scope of the instant invention. Such compounds and therapies are well known in the art (see for example Cancer: Principles and Practice of Oncology, Volumes 1 and 2, eds Devita, V. T., Hellman, S., and Rosenberg, S. A., J.B. Lippincott Company, Philadelphia, USA; incorporated herein by reference) and include, without limitations, folates, antifolates, pyrimidine analogs, fluoropyrimidines, purine analogs, adenosine analogs, topoisomerase I inhibitors, anthrapyrazoles, retinoids, antibiotics, anthacyclins, platinum analogs, alkylating agents, nitrosoureas, plant derived compounds such as vinca alkaloids, epipodophyllotoxins, tyrosine kinase inhibitors, taxols, radiation therapy, surgery, nutritional supplements, gene therapy, radiotherapy, for example 3D-CRT, immunotoxin therapy, for example ricin, and monoclonal antibodies. Specific examples of chemotherapeutic compounds that can be combined with or used in conjunction with the nucleic acid molecules of the invention include, but are not limited to, Paclitaxel; Docetaxel; Methotrexate; Doxorubin; Edatrexate; Vinorelbine; Tamoxifen; Leucovorin; 5-fluoro uridine (5-FU); Ionotecan; Cisplatin; Carboplatin; Amsacrine; Cytarabine; Bleomycin; Mitomycin C; Dactinomycin; Mithramycin; Hexamethylmelamine; Dacarbazine; L-asperginase; Nitrogen mustard; Melphalan, Chlorambucil; Busulfan; Ifosfamide; 4-hydroperoxycyclophosphamide, Thiotepa; Irinotecan (CAMPTOSAR®, CPT-11, Camptothecin-11, Campto) Tamoxifen, Herceptin; IMC C225; ABX-EGF: and combinations thereof are non-limiting examples of compounds and/or methods that can be combined with or used in conjunction with the nucleic acid molecules (e.g. siNA) of the instant invention. In addition, treatment of HCV infected subjects with siNA molecules of the invention targeting c-JUN or other MAP kinases involved in the maintenance or development of hepatocellular carcinoma can be combined with anti-viral compounds, such as siNA molecules targeting HCV RNA or other antiviral compounds known in the art (e.g., interferons, nucleoside analogs etc.). Those skilled in the art will recognize that other drug compounds and therapies can be similarly be readily combined with the nucleic acid molecules of the instant invention (e.g., siNA molecules) are hence within the scope of the instant invention.

### Example 12

### Diagnostic Uses

[0356] The siNA molecules of the invention can be used in a variety of diagnostic applications, such as in the identification of molecular targets (e.g., RNA) in a variety of applications, for example, in clinical, industrial, environmental, agricultural and/or research settings. Such diagnostic use of siNA molecules involves utilizing reconstituted RNAi systems, for example, using cellular lysates or partially purified cellular lysates. siNA molecules of this invention can be used as diagnostic tools to examine genetic drift and mutations within diseased cells or to detect the presence of endogenous or exogenous, for example viral, RNA in a cell. The close relationship between siNA activity and the structure of the target RNA allows the detection of mutations in any region of the molecule, which alters the base-pairing and three-dimensional structure of the target RNA. By using multiple siNA molecules described in this invention, one ca MAP nucleotide changes, which are important to RNA structure and function in vitro, as well as in cells and tissues. Cleavage of target RNAs with siNA molecules can be used to inhibit gene expression and define the role of specified gene products in the progression of disease or infection. In this manner, other genetic targets can be defined as important mediators of the disease. These experiments will lead to better treatment of the disease progression by affording the possibility of combination therapies (e.g., multiple siNA molecules targeted to different genes, siNA molecules coupled with known small molecule inhibitors, or intermittent treatment with combinations siNA molecules and/or other chemical or biological molecules). Other in vitro uses of siNA molecules of this invention are well known in the art, and include detection of the presence of mRNAs associated with a disease, infection, or related condition. Such RNA is detected by determining the presence of a cleavage product after treatment with a siNA using standard methodologies, for example, fluorescence resonance emission transfer (FRET).

[0357] In a specific example, siNA molecules that cleave only wild-type or mutant forms of the target RNA are used for the assay. The first siNA molecules (i.e., those that cleave only wild-type forms of target RNA) are used to identify wild-type RNA present in the sample and the second siNA molecules (i.e., those that cleave only mutant forms of target RNA) are used to identify mutant RNA in the sample. As reaction controls, synthetic substrates of both wild-type and mutant RNA are cleaved by both siNA molecules to demonstrate the relative siNA efficiencies in the reactions and the absence of cleavage of the “non-targeted” RNA species. The cleavage products from the synthetic substrates also serve to generate size markers for the analysis of wild-type and mutant RNAs in the sample population. Thus, each analysis requires two siNA molecules, two substrates and one unknown sample, which is combined into six reactions. The presence of cleavage products is determined using an RNase protection assay so that full-length and cleavage fragments of each RNA can be analyzed in one lane of a polyacrylamide gel. It is not absolutely required to quantify the results to gain insight into the expression of mutant RNAs and putative risk of the desired phenotypic changes in target cells. The expression of mRNA whose protein product is implicated in the development of the phenotype (i.e., disease related or infection related) is adequate to establish risk. If probes of comparable specific activity are used for both transcripts, then a qualitative comparison of RNA levels is adequate and decreases the cost of the initial diagnosis. Higher mutant form to wild-type ratios are correlated with higher risk whether RNA levels are compared qualitatively or quantitatively.

[0358] All patents and publications mentioned in the specification are indicative of the levels of skill of those skilled in the art to which the invention pertains. All references cited in this disclosure are incorporated by reference to the same extent as if each reference had been incorporated by reference in its entirety individually.

[0359] One skilled in the art would readily appreciate that the present invention is well adapted to carry out the objects and obtain the ends and advantages mentioned, as well as those inherent therein. The methods and compositions described herein as presently representative of preferred embodiments are exemplary and are not intended as limitations on the scope of the invention. Changes therein and other uses will occur to those skilled in the art, which are encompassed within the spirit of the invention, are defined by the scope of the claims.

[0360] It will be readily apparent to one skilled in the art that varying substitutions and modifications can be made to the invention disclosed herein without departing from the scope and spirit of the invention. Thus, such additional embodiments are within the scope of the present invention and the following claims. The present invention teaches one skilled in the art to test various combinations and/or substitutions of chemical modifications described herein toward generating nucleic acid constructs with improved activity for mediating RNAi activity. Such improved activity can comprise improved stability, improved bioavailability, and/or improved activation of cellular responses mediating RNAi. Therefore, the specific embodiments described herein are not limiting and one skilled in the art can readily appreciate that specific combinations of the modifications described herein can be tested without undue experimentation toward identifying siNA molecules with improved RNAi activity.

[0361] The invention illustratively described herein suitably can be practiced in the absence of any element or elements, limitation or limitations that are not specifically disclosed herein. The terms and expressions which have been employed are used as terms of description and not of limitation, and there is no intention that in the use of such terms and expressions of excluding any equivalents of the features shown and described or portions thereof, but it is recognized that various modifications are possible within the scope of the invention claimed. Thus, it should be understood that although the present invention has been specifically disclosed by preferred embodiments, optional features, modification and variation of the concepts herein disclosed may be resorted to by those skilled in the art, and that such modifications and variations are considered to be within the scope of this invention as defined by the description and the appended claims.

[0362] In addition, where features or aspects of the invention are described in terms of Markush groups or other grouping of alternatives, those skilled in the art will recognize that the invention is also thereby described in terms of any individual member or subgroup of members of the Markush group or other group.

TABLE I
MAP kinase Accession Numbers

| | |
|---|---|
| NM_002745 | Homo sapiens mitogen-activated protein kinase 1 (MAPK1), transcript variant 1, mRNA. |
| NM_138957 | Homo sapiens mitogen-activated protein kinase 1 (MAPK1), transcript variant 2, mRNA. |
| X60188 | Human ERK1 mRNA for protein serine/threonine kinase (MAPK3). |
| XM_055766 | Homo sapiens mitogen-activated protein kinase 3 (MAPK3), mRNA |
| NM_002747 | Homo sapiens mitogen-activated protein kinase 4 (MAPK4), mRNA |
| XM_165662 | Homo sapiens Mitogen-activated protein kinase 4 (Extracellular signal-regulated kinase 4) (ERK-4) (MAP kinase |
| | isoform p63) (p63-MAPK) (LOC220131), mRNA |
| NM_002748 | Homo sapiens mitogen-activated protein kinase 6 (MAPK6), mRNA. |
| XM_166057 | Homo sapiens Mitogen-activated protein kinase 6 (Extracellular signal-regulated kinase 3) (ERK-3) (MAP kinase |
| | isoform p97) (p97-MAPK) (LOC220839), mRNA |
| XM_035575 | Homo sapiens mitogen-activated protein kinase 6 (MAPK6), mRNA |
| NM_139033 | Homo sapiens mitogen-activated protein kinase 7 (MAPK7), transcript variant 1, mRNA |
| NM_139032 | Homo sapiens mitogen-activated protein kinase 7 (MAPK7), transcript variant 2, mRNA |
| NM_002749 | Homo sapiens mitogen-activated protein kinase 7 (MAPK7), transcript variant 3, mRNA |
| NM_139034 | Homo sapiens mitogen-activated protein kinase 7 (MAPK7), transcript variant 4, mRNA |
| NM_139049 | Homo sapiens mitogen-activated protein kinase 8 (MAPK8), transcript variant 1, mRNA. |
| NM_002750 | Homo sapiens mitogen-activated protein kinase 8 (MAPK8), transcript variant 2, mRNA. |
| NM_139046 | Homo sapiens mitogen-activated protein kinase 8 (MAPK8), transcript variant 3, mRNA. |
| NM_139047 | Homo sapiens mitogen-activated protein kinase 8 (MAPK8), transcript variant 4, mRNA. |
| NM_002752 | Homo sapiens mitogen-activated protein kinase 9 (MAPK9), transcript variant 1, mRNA. |
| NM_139068 | Homo sapiens mitogen-activated protein kinase 9 (MAPK9), transcript variant 2, mRNA. |
| NM_139069 | Homo sapiens mitogen-activated protein kinase 9 (MAPK9), transcript variant 3, mRNA. |
| NM_139070 | Homo sapiens mitogen-activated protein kinase 9 (MAPK9), transcript variant 4, mRNA. |
| NM_002753 | Homo sapiens mitogen-activated protein kinase 10 (MAPK10), transcript variant 1, mRNA |
| NM_138982 | Homo sapiens mitogen-activated protein kinase 10 (MAPK10), transcript variant 2, mRNA |
| NM_138980 | Homo sapiens mitogen-activated protein kinase 10 (MAPK10), transcript variant 3, mRNA |
| NM_138981 | Homo sapiens mitogen-activated protein kinase 10 (MAPK10), transcript variant 4, mRNA |
| NM_002751 | Homo sapiens mitogen-activated protein kinase 11 (MAPK11), transcript variant 1, mRNA. |
| NM_138993 | Homo sapiens mitogen-activated protein kinase 11 (MAPK11), transcript variant 2, mRNA. |
| NM_002969 | Homo sapiens mitogen-activated protein kinase 12 (MAPK12), mRNA. |
| NM_002754 | Homo sapiens mitogen-activated protein kinase 13 (MAPK13), mRNA. |
| NM_001315 | Homo sapiens mitogen-activated protein kinase 14 (MAPK14), transcript variant 1, mRNA. |
| NM_139012 | Homo sapiens mitogen-activated protein kinase 14 (MAPK14), transcript variant 2, mRNA. |
| NM_139013 | Homo sapiens mitogen-activated protein kinase 14 (MAPK14), transcript variant 3, mRNA. |
| NM_139014 | Homo sapiens mitogen-activated protein kinase 14 (MAPK14), transcript variant 4, mRNA. |
| NM_002755 | Homo sapiens mitogen-activated protein kinase kinase 1 (MAP2K1), mRNA |
| NM_030662 | Homo sapiens mitogen-activated protein kinase kinase 2 (MAP2K2), mRNA |
| NM_002756 | Homo sapiens mitogen-activated protein kinase kinase 3 (MAP2K3), transcript variant A, mRNA |
| NM_145109 | Homo sapiens mitogen-activated protein kinase kinase 3 (MAP2K3), transcript variant B, mRNA |
| NM_145110 | Homo sapiens mitogen-activated protein kinase kinase 3 (MAP2K3), transcript variant C, mRNA |
| XM_008654 | Homo sapiens mitogen-activated protein kinase kinase 4 (MAP2K4), mRNA |
| NM_003010 | Homo sapiens mitogen-activated protein kinase kinase 4 (MAP2K4), mRNA |
| NM_145160 | Homo sapiens mitogen-activated protein kinase kinase 5 (MAP2K5), transcript variant A, mRNA |
| NM_002757 | Homo sapiens mitogen-activated protein kinase kinase 5 (MAP2K5), transcript variant B, mRNA |
| NM_145161 | Homo sapiens mitogen-activated protein kinase kinase 5 (MAP2K5), transcript variant C, mRNA |
| NM_145162 | Homo sapiens mitogen-activated protein kinase kinase 5 (MAP2K5), transcript variant D, mRNA |
| XM_113313 | Homo sapiens mitogen-activated protein kinase kinase 6 (MAP2K6), mRNA |
| NM_002758 | Homo sapiens mitogen-activated protein kinase kinase 6 (MAP2K6), transcript variant 1, mRNA |
| NM_031988 | Homo sapiens mitogen-activated protein kinase kinase 6 (MAP2K6), transcript variant 2, mRNA |
| NM_005043 | Homo sapiens mitogen-activated protein kinase kinase 7 (MAP2K7), transcript variant A, mRNA |
| NM_145185 | Homo sapiens mitogen-activated protein kinase kinase 7 (MAP2K7), transcript variant B, mRNA |
| NM_145329 | Homo sapiens mitogen-activated protein kinase kinase 7 (MAP2K7), transcript variant C, mRNA |
| AF042838 | Homo sapiens mitogen-activated protein kinase kinase kinase 1 (MAP3K1), mRNA |
| NM_006609 | Homo sapiens mitogen-activated protein kinase kinase kinase 2 (MAP3K2), mRNA |
| NM_002401 | Homo sapiens mitogen-activated protein kinase kinase kinase 3 (MAP3K3), mRNA |
| NM_005922 | Homo sapiens mitogen-activated protein kinase kinase kinase 4 (MAP3K4), transcript variant 1, mRNA |
| NM_006724 | Homo sapiens mitogen-activated protein kinase kinase kinase 4 (MAP3K4), transcript variant 2, mRNA |
| NM_005923 | Homo sapiens mitogen-activated protein kinase kinase kinase 5 (MAP3K5), mRNA |
| NM_004672 | Homo sapiens mitogen-activated protein kinase kinase kinase 6 (MAP3K6), mRNA |
| NM_003188 | Homo sapiens mitogen-activated protein kinase kinase kinase 7 (MAP3K7), mRNA |
| NM_005204 | Homo sapiens mitogen-activated protein kinase kinase kinase 8 (MAP3K8), mRNA |
| AF251442 | Homo sapiens mitogen-activated protein kinase kinase kinase 9 (MAP3K9), mRNA |
| NM_002446 | Homo sapiens mitogen-activated protein kinase kinase kinase 10 (MAP3K10), mRNA |
| NM_002419 | Homo sapiens mitogen-activated protein kinase kinase kinase 11 (MAP3K11), mRNA |
| NM_006301 | Homo sapiens mitogen-activated protein kinase kinase kinase 12 (MAP3K12), mRNA |
| NM_004721 | Homo sapiens mitogen-activated protein kinase kinase kinase 13 (MAP3K13), mRNA |
| NM_003954 | Homo sapiens mitogen-activated protein kinase kinase kinase 14 (MAP3K14), mRNA |
| NM_007181 | Homo sapiens mitogen-activated protein kinase kinase kinase kinase 1 (MAP4K1), mRNA |
| NM_004579 | Homo sapiens mitogen-activated protein kinase kinase kinase kinase 2 (MAP4K2), mRNA |
| NM_003618 | Homo sapiens mitogen-activated protein kinase kinase kinase kinase 3 (MAP4K3), mRNA |
| NM_004834 | Homo sapiens mitogen-activated protein kinase kinase kinase kinase 4 (MAP4K4), mRNA |
| NM_006575 | Homo sapiens mitogen-activated protein kinase kinase kinase kinase 5 (MAP4K5), mRNA |
| NM_003668 | Homo sapiens mitogen-activated protein kinase-activated protein kinase 5 (MAPKAPK5), transcript variant 1, mRNA |
| NM_139078 | Homo sapiens mitogen-activated protein kinase-activated protein kinase 5 (MAPKAPK5), transcript variant 2, mRNA |
| NM_004635 | Homo sapiens mitogen-activated protein kinase-activated protein kinase 3 (MAPKAPK3), mRNA |
| NM_004759 | Homo sapiens mitogen-activated protein kinase-activated protein kinase 2 (MAPKAPK2), transcript variant 1, mRNA |
| NM_032960 | Homo sapiens mitogen-activated protein kinase-activated protein kinase 2 (MAPKAPK2), transcript variant 2, mRNA |
| NM_005373 | Homo sapiens myeloproliferative leukemia virus oncogene (MPL), mRNA |
| NM_016848 | Homo sapiens neuronal Shc (SHC3), mRNA |
| NM_002649 | Homo sapiens phosphoinositide-3-kinase, catalytic, gamma polypeptide (PIK3CG), mRNA |
| NM_021003 | Homo sapiens protein phosphatase 1A (formerly 2C), magnesium-dependent, alpha isoform (PPM1A), mRNA |
| NM_003942 | Homo sapiens ribosomal protein S6 kinase, 90 kD, polypeptide 4 (RPS6KA4), mRNA |
| NM_004755 | Homo sapiens ribosomal protein S6 kinase, 90 kD, polypeptide 5 (RPS6KA5), mRNA |
| NM_002228 | Homo sapiens v-jun sarcoma virus 17 oncogene homolog (avian) (JUN), mRNA |

TABLE II
MAP kinase siNA and Target Sequences

| | | | | | | | | |
|---|---|---|---|---|---|---|---|---|
| | | Seq | | | Seq | | | Seq |
| Pos | Target Sequence | ID | UPos | Upper seq | ID | LPos | Lower seq | ID |

NM_002745 (MAPK1/ERK2)

| | | | | | | | | |
|---|---|---|---|---|---|---|---|---|
| 3 | CCCUCCCUCCGCCCGCCCG | 1 | 3 | CCCUCCCUCCGCCCGCCCG | 1 | 21 | CGGGCGGGCGGAGGGAGGG | 164 |
| 21 | GCCGGCCCGCCCGUCAGUC | 2 | 21 | GCCGGCCCGCCCGUCAGUC | 2 | 39 | GACUGACGGGCGGGCCGGC | 165 |
| 39 | CUGGCAGGCAGGCAGGCAA | 3 | 39 | CUGGCAGGCAGGCAGGCAA | 3 | 57 | UUGCCUGCCUGCCUGCCAG | 166 |
| 57 | AUCGGUCCGAGUGGCUGUC | 4 | 57 | AUCGGUCCGAGUGGCUGUC | 4 | 75 | GACAGCCACUCGGACCGAU | 167 |
| 75 | CGGCUCUUCAGCUCUCCCG | 5 | 75 | CGGCUCUUCAGCUCUCCCG | 5 | 93 | CGGGAGAGCUGAAGAGCCG | 168 |
| 93 | GCUCGGCGUCUUCCUUCCU | 6 | 93 | GCUCGGCGUCUUCCUUCCU | 6 | 111 | AGGAAGGAAGACGCCGAGC | 169 |
| 111 | UCCUCCCGGUCAGCGUCGG | 7 | 111 | UCCUCCCGGUCAGCGUCGG | 7 | 129 | CCGACGCUGACCGGGAGGA | 170 |
| 129 | GCGGCUGCACCGGCGGCGG | 8 | 129 | GCGGCUGCACCGGCGGCGG | 8 | 147 | CCGCCGCCGGUGCAGCCGC | 171 |
| 147 | GCGCAGUCCCUGCGGGAGG | 9 | 147 | GCGCAGUCCCUGCGGGAGG | 9 | 165 | CCUCCCGCAGGGACUGCGC | 172 |
| 165 | GGGCGACAAGAGCUGAGCG | 10 | 165 | GGGCGACAAGAGCUGAGCG | 10 | 183 | CGCUCAGCUCUUGUCGCCC | 173 |
| 183 | GGCGGCCGCCGAGCGUCGA | 11 | 183 | GGCGGCCGCCGAGCGUCGA | 11 | 201 | UCGACGCUCGGCGGCCGCC | 174 |
| 201 | AGCUCAGCGCGGCGGAGGC | 12 | 201 | AGCUCAGCGCGGCGGAGGC | 12 | 219 | GCCUCCGCCGCGCUGAGCU | 175 |
| 219 | CGGCGGCGGCCCGGCAGCC | 13 | 219 | CGGCGGCGGCCCGGCAGCC | 13 | 237 | GGCUGCCGGGCCGCCGCCG | 176 |
| 237 | CAACAUGGCGGCGGCGGCG | 14 | 237 | CAACAUGGCGGCGGCGGCG | 14 | 255 | CGCCGCCGCCGCCAUGUUG | 177 |
| 255 | GGCGGCGGGCGCGGGCCCG | 15 | 255 | GGCGGCGGGCGCGGGCCCG | 15 | 273 | CGGGCCCGCGCCCGCCGCC | 178 |
| 273 | GGAGAUGGUCCGCGGGCAG | 16 | 273 | GGAGAUGGUCCGCGGGCAG | 16 | 291 | CUGCCCGCGGACCAUCUCC | 179 |
| 291 | GGUGUUCGACGUGGGGCCG | 17 | 291 | GGUGUUCGACGUGGGGCCG | 17 | 309 | CGGCCCCACGUCGAACACC | 180 |
| 309 | GCGCUACACCAACCUCUCG | 18 | 309 | GCGCUACACCAACCUCUCG | 18 | 327 | CGAGAGGUUGGUGUAGCGC | 181 |
| 327 | GUACAUCGGCGAGGGCGCC | 19 | 327 | GUACAUCGGCGAGGGCGCC | 19 | 345 | GGCGCCCUCGCCGAUGUAC | 182 |
| 345 | CUACGGCAUGGUGUGCUCU | 20 | 345 | CUACGGCAUGGUGUGCUCU | 20 | 363 | AGAGCACACCAUGCCGUAG | 183 |
| 363 | UGCUUAUGAUAAUGUCAAC | 21 | 363 | UGCUUAUGAUAAUGUCAAC | 21 | 381 | GUUGACAUUAUCAUAAGCA | 184 |
| 381 | CAAAGUUCGAGUAGCUAUC | 22 | 381 | CAAAGUUCGAGUAGCUAUC | 22 | 399 | GAUAGCUACUCGAACUUUG | 185 |
| 399 | CAAGAAAAUCAGCCCCUUU | 23 | 399 | CAAGAAAAUCAGCCCCUUU | 23 | 417 | AAAGGGGCUGAUUUUCUUG | 186 |
| 417 | UGAGCACCAGACCUACUGC | 24 | 417 | UGAGCACCAGACCUACUGC | 24 | 435 | GCAGUAGGUCUGGUGCUCA | 187 |
| 435 | CCAGAGAACCCUGAGGGAG | 25 | 435 | CCAGAGAACCCUGAGGGAG | 25 | 453 | CUCCCUCAGGGUUCUCUGG | 188 |
| 453 | GAUAAAAAUCUUACUGCGC | 26 | 453 | GAUAAAAAUCUUACUGCGC | 26 | 471 | GCGCAGUAAGAUUUUUAUC | 189 |
| 471 | CUUCAGACAUGAGAACAUC | 27 | 471 | CUUCAGACAUGAGAACAUC | 27 | 489 | GAUGUUCUCAUGUCUGAAG | 190 |
| 489 | CAUUGGAAUCAAUGACAUU | 28 | 489 | CAUUGGAAUCAAUGACAUU | 28 | 507 | AAUGUCAUUGAUUCCAAUG | 191 |
| 507 | UAUUCGAGCACCAACCAUC | 29 | 507 | UAUUCGAGCACCAACCAUC | 29 | 525 | GAUGGUUGGUGCUCGAAUA | 192 |
| 525 | CGAGCAAAUGAAAGAUGUA | 30 | 525 | CGAGCAAAUGAAAGAUGUA | 30 | 543 | UACAUCUUUCAUUUGCUCG | 193 |
| 543 | AUAUAUAGUACAGGACCUC | 31 | 543 | AUAUAUAGUACAGGACCUC | 31 | 561 | GAGGUCCUGUACUAUAUAU | 194 |
| 561 | CAUGGAAACAGAUCUUUAC | 32 | 561 | CAUGGAAACAGAUCUUUAC | 32 | 579 | GUAAAGAUCUGUUUCCAUG | 195 |
| 579 | CAAGCUCUUGAAGACACAA | 33 | 579 | CAAGCUCUUGAAGACACAA | 33 | 597 | UUGUGUCUUCAAGAGCUUG | 196 |
| 597 | ACACCUCAGCAAUGACCAU | 34 | 597 | ACACCUCAGCAAUGACCAU | 34 | 615 | AUGGUCAUUGCUGAGGUGU | 197 |
| 615 | UAUCUGCUAUUUUCUCUAC | 35 | 615 | UAUCUGCUAUUUUCUCUAC | 35 | 633 | GUAGAGAAAAUAGCAGAUA | 198 |
| 633 | CCAGAUCCUCAGAGGGUUA | 36 | 633 | CCAGAUCCUCAGAGGGUUA | 36 | 651 | UAACCCUCUGAGGAUCUGG | 199 |
| 651 | AAAAUAUAUCCAUUCAGCU | 37 | 651 | AAAAUAUAUCCAUUCAGCU | 37 | 669 | AGCUGAAUGGAUAUAUUUU | 200 |
| 669 | UAACGUUCUGCACCGUGAC | 38 | 669 | UAACGUUCUGCACCGUGAC | 38 | 687 | GUCACGGUGCAGAACGUUA | 201 |
| 687 | CCUCAAGCCUUCCAACCUG | 39 | 687 | CCUCAAGCCUUCCAACCUG | 39 | 705 | CAGGUUGGAAGGCUUGAGG | 202 |
| 705 | GCUGCUCAACACCACCUGU | 40 | 705 | GCUGCUCAACACCACCUGU | 40 | 723 | ACAGGUGGUGUUGAGCAGC | 203 |
| 723 | UGAUCUCAAGAUCUGUGAC | 41 | 723 | UGAUCUCAAGAUCUGUGAC | 41 | 741 | GUCACAGAUCUUGAGAUCA | 204 |
| 741 | CUUUGGCCUGGCCCGUGUU | 42 | 741 | CUUUGGCCUGGCCCGUGUU | 42 | 759 | AACACGGGCCAGGCCAAAG | 205 |
| 759 | UGCAGAUCCAGACCAUGAU | 43 | 759 | UGCAGAUCCAGACCAUGAU | 43 | 777 | AUCAUGGUCUGGAUCUGCA | 206 |
| 777 | UCACACAGGGUUCCUGACA | 44 | 777 | UCACACAGGGUUCCUGACA | 44 | 795 | UGUCAGGAACCCUGUGUGA | 207 |
| 795 | AGAAUAUGUGGCCACACGU | 45 | 795 | AGAAUAUGUGGCCACACGU | 45 | 813 | ACGUGUGGCCACAUAUUCU | 208 |
| 813 | UUGGUACAGGGCUCCAGAA | 46 | 813 | UUGGUACAGGGCUCCAGAA | 46 | 831 | UUCUGGAGCCCUGUACCAA | 209 |
| 831 | AAUUAUGUUGAAUUCCAAG | 47 | 831 | AAUUAUGUUGAAUUCCAAG | 47 | 849 | CUUGGAAUUCAACAUAAUU | 210 |
| 849 | GGGCUACACCAAGUCCAUU | 48 | 849 | GGGCUACACCAAGUCCAUU | 48 | 867 | AAUGGACUUGGUGUAGCCC | 211 |
| 867 | UGAUAUUUGGUCUGUAGGC | 49 | 867 | UGAUAUUUGGUCUGUAGGC | 49 | 885 | GCCUACAGACCAAAUAUCA | 212 |
| 885 | CUGCAUUCUGGCAGAAAUG | 50 | 885 | CUGCAUUCUGGCAGAAAUG | 50 | 903 | CAUUUCUGCCAGAAUGCAG | 213 |
| 903 | GCUUUCUAACAGGCCCAUC | 51 | 903 | GCUUUCUAACAGGCCCAUC | 51 | 921 | GAUGGGCCUGUUAGAAAGC | 214 |
| 921 | CUUUCCAGGGAAGCAUUAU | 52 | 921 | CUUUCCAGGGAAGCAUUAU | 52 | 939 | AUAAUGCUUCCCUGGAAAG | 215 |
| 939 | UCUUGACCAGCUGAAACAC | 53 | 939 | UCUUGACCAGCUGAAACAC | 53 | 957 | GUGUUUCAGCUGGUCAAGA | 216 |
| 957 | CAUUUUGGGUAUUCUUGGA | 54 | 957 | CAUUUUGGGUAUUCUUGGA | 54 | 975 | UCCAAGAAUACCCAAAAUG | 217 |
| 975 | AUCCCCAUCACAAGAAGAC | 55 | 975 | AUCCCCAUCACAAGAAGAC | 55 | 993 | GUCUUCUUGUGAUGGGGAU | 218 |
| 993 | CCUGAAUUGUAUAAUAAAU | 56 | 993 | CCUGAAUUGUAUAAUAAAU | 56 | 1011 | AUUUAUUAUACAAUUCAGG | 219 |
| 1011 | UUUAAAAGCUAGGAACUAU | 57 | 1011 | UUUAAAAGCUAGGAACUAU | 57 | 1029 | AUAGUUCCUAGCUUUUAAA | 220 |
| 1029 | UUUGCUUUCUCUUCCACAC | 58 | 1029 | UUUGCUUUCUCUUCCACAC | 58 | 1047 | GUGUGGAAGAGAAAGCAAA | 221 |
| 1047 | CAAAAAUAAGGUGCCAUGG | 59 | 1047 | CAAAAAUAAGGUGCCAUGG | 59 | 1065 | CCAUGGCACCUUAUUUUUG | 222 |
| 1065 | GAACAGGCUGUUCCCAAAU | 60 | 1065 | GAACAGGCUGUUCCCAAAU | 60 | 1083 | AUUUGGGAACAGCCUGUUC | 223 |
| 1083 | UGCUGACUCCAAAGCUCUG | 61 | 1083 | UGCUGACUCCAAAGCUCUG | 61 | 1101 | CAGAGCUUUGGAGUCAGCA | 224 |
| 1101 | GGACUUAUUGGACAAAAUG | 62 | 1101 | GGACUUAUUGGACAAAAUG | 62 | 1119 | CAUUUUGUCCAAUAAGUCC | 225 |
| 1119 | GUUGACAUUCAACCCACAC | 63 | 1119 | GUUGACAUUCAACCCACAC | 63 | 1137 | GUGUGGGUUGAAUGUCAAC | 226 |
| 1137 | CAAGAGGAUUGAAGUAGAA | 64 | 1137 | CAAGAGGAUUGAAGUAGAA | 64 | 1155 | UUCUACUUCAAUCCUCUUG | 227 |
| 1155 | ACAGGCUCUGGCCCACCCA | 65 | 1155 | ACAGGCUCUGGCCCACCCA | 65 | 1173 | UGGGUGGGCCAGAGCCUGU | 228 |
| 1173 | AUAUCUGGAGCAGUAUUAC | 66 | 1173 | AUAUCUGGAGCAGUAUUAC | 66 | 1191 | GUAAUACUGCUCCAGAUAU | 229 |
| 1191 | CGACCCGAGUGACGAGCCC | 67 | 1191 | CGACCCGAGUGACGAGCCC | 67 | 1209 | GGGCUCGUCACUCGGGUCG | 230 |
| 1209 | CAUCGCCGAAGCACCAUUC | 68 | 1209 | CAUCGCCGAAGCACCAUUC | 68 | 1227 | GAAUGGUGCUUCGGCGAUG | 231 |
| 1227 | CAAGUUCGACAUGGAAUUG | 69 | 1227 | CAAGUUCGACAUGGAAUUG | 69 | 1245 | CAAUUCCAUGUCGAACUUG | 232 |
| 1245 | GGAUGACUUGCCUAAGGAA | 70 | 1245 | GGAUGACUUGCCUAAGGAA | 70 | 1263 | UUCCUUAGGCAAGUCAUCC | 233 |
| 1263 | AAAGCUCAAAGAACUAAUU | 71 | 1263 | AAAGCUCAAAGAACUAAUU | 71 | 1281 | AAUUAGUUCUUUGAGCUUU | 234 |
| 1281 | UUUUGAAGAGACUGCUAGA | 72 | 1281 | UUUUGAAGAGACUGCUAGA | 72 | 1299 | UCUAGCAGUCUCUUCAAAA | 235 |
| 1299 | AUUCCAGCCAGGAUACAGA | 73 | 1299 | AUUCCAGCCAGGAUACAGA | 73 | 1317 | UCUGUAUCCUGGCUGGAAU | 236 |
| 1317 | AUCUUAAAUUUGUCAGGAC | 74 | 1317 | AUCUUAAAUUUGUCAGGAC | 74 | 1335 | GUCCUGACAAAUUUAAGAU | 237 |
| 1335 | CAAGGGCUCAGAGGACUGG | 75 | 1335 | CAAGGGCUCAGAGGACUGG | 75 | 1353 | CCAGUCCUCUGAGCCCUUG | 238 |
| 1353 | GACGUGCUCAGACAUCGGU | 76 | 1353 | GACGUGCUCAGACAUCGGU | 76 | 1371 | ACCGAUGUCUGAGCACGUC | 239 |
| 1371 | UGUUCUUCUUCCCAGUUCU | 77 | 1371 | UGUUCUUCUUCCCAGUUCU | 77 | 1389 | AGAACUGGGAAGAAGAACA | 240 |
| 1389 | UUGACCCCUGGUCCUGUCU | 78 | 1389 | UUGACCCCUGGUCCUGUCU | 78 | 1407 | AGACAGGACCAGGGGUCAA | 241 |
| 1407 | UCCAGCCCGUCUUGGCUUA | 79 | 1407 | UCCAGCCCGUCUUGGCUUA | 79 | 1425 | UAAGCCAAGACGGGCUGGA | 242 |
| 1425 | AUCCACUUUGACUCCUUUG | 80 | 1425 | AUCCACUUUGACUCCUUUG | 80 | 1443 | CAAAGGAGUCAAAGUGGAU | 243 |
| 1443 | GAGCCGUUUGGAGGGGCGG | 81 | 1443 | GAGCCGUUUGGAGGGGCGG | 81 | 1461 | CCGCCCCUCCAAACGGCUC | 244 |
| 1461 | GUUUCUGGUAGUUGUGGCU | 82 | 1461 | GUUUCUGGUAGUUGUGGCU | 82 | 1479 | AGCCACAACUACCAGAAAC | 245 |
| 1479 | UUUUAUGCUUUCAAAGAAU | 83 | 1479 | UUUUAUGCUUUCAAAGAAU | 83 | 1497 | AUUCUUUGAAAGCAUAAAA | 246 |
| 1497 | UUUCUUCAGUCCAGAGAAU | 84 | 1497 | UUUCUUCAGUCCAGAGAAU | 84 | 1515 | AUUCUCUGGACUGAAGAAA | 247 |
| 1515 | UUCCUCCUGGCAGCCCUGU | 85 | 1515 | UUCCUCCUGGCAGCCCUGU | 85 | 1533 | ACAGGGCUGCCAGGAGGAA | 248 |
| 1533 | UGUGUGUCACCCAUUGGUG | 86 | 1533 | UGUGUGUCACCCAUUGGUG | 86 | 1551 | CACCAAUGGGUGACACACA | 249 |
| 1551 | GACCUGCGGCAGUAUGUAC | 87 | 1551 | GACCUGCGGCAGUAUGUAC | 87 | 1569 | GUACAUACUGCCGCAGGUC | 250 |
| 1569 | CUUCAGUGCACCUUACUGC | 88 | 1569 | CUUCAGUGCACCUUACUGC | 88 | 1587 | GCAGUAAGGUGCACUGAAG | 251 |
| 1587 | CUUACUGUUGCUUUAGUCA | 89 | 1587 | CUUACUGUUGCUUUAGUCA | 89 | 1605 | UGACUAAAGCAACAGUAAG | 252 |
| 1605 | ACUAAUUGCUUUCUGGUUU | 90 | 1605 | ACUAAUUGCUUUCUGGUUU | 90 | 1623 | AAACCAGAAAGCAAUUAGU | 253 |
| 1623 | UGAAAGAUGCAGUGGUUCC | 91 | 1623 | UGAAAGAUGCAGUGGUUCC | 91 | 1641 | GGAACCACUGCAUCUUUCA | 254 |
| 1641 | CUCCCUCUCCUGAAUCCUU | 92 | 1641 | CUCCCUCUCCUGAAUCCUU | 92 | 1659 | AAGGAUUCAGGAGAGGGAG | 255 |
| 1659 | UUUCUACAUGAUGCCCUGC | 93 | 1659 | UUUCUACAUGAUGCCCUGC | 93 | 1677 | GCAGGGCAUCAUGUAGAAA | 256 |
| 1677 | CUGACCAUGCAGCCGCACC | 94 | 1677 | CUGACCAUGCAGCCGCACC | 94 | 1695 | GGUGCGGCUGCAUGGUCAG | 257 |
| 1695 | CAGAGAGAGAUUCUUCCCC | 95 | 1695 | CAGAGAGAGAUUCUUCCCC | 95 | 1713 | GGGGAAGAAUCUCUCUCUG | 258 |
| 1713 | CAAUUGGCUCUAGUCACUG | 96 | 1713 | CAAUUGGCUCUAGUCACUG | 96 | 1731 | CAGUGACUAGAGCCAAUUG | 259 |
| 1731 | GGCAUCUCACUUUAUGAUA | 97 | 1731 | GGCAUCUCACUUUAUGAUA | 97 | 1749 | UAUCAUAAAGUGAGAUGCC | 260 |
| 1749 | AGGGAAGGCUACUACCUAG | 98 | 1749 | AGGGAAGGCUACUACCUAG | 98 | 1767 | CUAGGUAGUAGCCUUCCCU | 261 |
| 1767 | GGGCACUUUAAGUCAGUGA | 99 | 1767 | GGGCACUUUAAGUCAGUGA | 99 | 1785 | UCACUGACUUAAAGUGCCC | 262 |
| 1785 | ACAGCCCCUUAUUUGCACU | 100 | 1785 | ACAGCCCCUUAUUUGCACU | 100 | 1803 | AGUGCAAAUAAGGGGCUGU | 263 |
| 1803 | UUCACCUUUUGACCAUAAC | 101 | 1803 | UUCACCUUUUGACCAUAAC | 101 | 1821 | GUUAUGGUCAAAAGGUGAA | 264 |
| 1821 | CUGUUUCCCCAGAGCAGGA | 102 | 1821 | CUGUUUCCCCAGAGCAGGA | 102 | 1839 | UCCUGCUCUGGGGAAACAG | 265 |
| 1839 | AGCUUGUGGAAAUACCUUG | 103 | 1839 | AGCUUGUGGAAAUACCUUG | 103 | 1857 | CAAGGUAUUUCCACAAGCU | 266 |
| 1857 | GGCUGAUGUUGCAGCCUGC | 104 | 1857 | GGCUGAUGUUGCAGCCUGC | 104 | 1875 | GCAGGCUGCAACAUCAGCC | 267 |
| 1875 | CAGCAAGUGCUUCCGUCUC | 105 | 1875 | CAGCAAGUGCUUCCGUCUC | 105 | 1893 | GAGACGGAAGCACUUGCUG | 268 |
| 1893 | CCGGAAUCCUUGGGGAGCA | 106 | 1893 | CCGGAAUCCUUGGGGAGCA | 106 | 1911 | UGCUCCCCAAGGAUUCCGG | 269 |
| 1911 | ACUUGUCCACGUCUUUUCU | 107 | 1911 | ACUUGUCCACGUCUUUUCU | 107 | 1929 | AGAAAAGACGUGGACAAGU | 270 |
| 1929 | UCAUAUCAUGGUAGUCACU | 108 | 1929 | UCAUAUCAUGGUAGUCACU | 108 | 1947 | AGUGACUACCAUGAUAUGA | 271 |
| 1947 | UAACAUAUAUAAGGUAUGU | 109 | 1947 | UAACAUAUAUAAGGUAUGU | 109 | 1965 | ACAUACCUUAUAUAUGUUA | 272 |
| 1965 | UGCUAUUGGCCCAGCUUUU | 110 | 1965 | UGCUAUUGGCCCAGCUUUU | 110 | 1983 | AAAAGCUGGGCCAAUAGCA | 273 |
| 1983 | UAGAAAAUGCAGUCAUUUU | 111 | 1983 | UAGAAAAUGCAGUCAUUUU | 111 | 2001 | AAAAUGACUGCAUUUUCUA | 274 |
| 2001 | UUCUAAAUAAAAAGGAAGU | 112 | 2001 | UUCUAAAUAAAAAGGAAGU | 112 | 2019 | ACUUCCUUUUUAUUUAGAA | 275 |
| 2019 | UACUGCACCCAGCAGUGUC | 113 | 2019 | UACUGCACCCAGCAGUGUC | 113 | 2037 | GACACUGCUGGGUGCAGUA | 276 |
| 2037 | CACUCUGUAGUUACUGUGG | 114 | 2037 | CACUCUGUAGUUACUGUGG | 114 | 2055 | CCACAGUAACUACAGAGUG | 277 |
| 2055 | GUCACUUGUACCAUAUAGA | 115 | 2055 | GUCACUUGUACCAUAUAGA | 115 | 2073 | UCUAUAUGGUACAAGUGAC | 278 |
| 2073 | AGGUGUAACACUUGUCAAG | 116 | 2073 | AGGUGUAACACUUGUCAAG | 116 | 2091 | CUUGACAAGUGUUACACCU | 279 |
| 2091 | GAAGCGUUAUGUGCAGUAC | 117 | 2091 | GAAGCGUUAUGUGCAGUAC | 117 | 2109 | GUACUGCACAUAACGCUUC | 280 |
| 2109 | CUUAAUGUUUGUAAGACUU | 118 | 2109 | CUUAAUGUUUGUAAGACUU | 118 | 2127 | AAGUCUUACAAACAUUAAG | 281 |
| 2127 | UACAAAAAAAGAUUUAAAG | 119 | 2127 | UACAAAAAAAGAUUUAAAG | 119 | 2145 | CUUUAAAUCUUUUUUUGUA | 282 |
| 2145 | GUGGCAGCUUCACUCGACA | 120 | 2145 | GUGGCAGCUUCACUCGACA | 120 | 2163 | UGUCGAGUGAAGCUGCCAC | 283 |
| 2163 | AUUUGGUGAGAGAAGUACA | 121 | 2163 | AUUUGGUGAGAGAAGUACA | 121 | 2181 | UGUACUUCUCUCACCAAAU | 284 |
| 2181 | AAAGGUUGCAGUGCUGAGC | 122 | 2181 | AAAGGUUGCAGUGCUGAGC | 122 | 2199 | GCUCAGCACUGCAACCUUU | 285 |
| 2199 | CUGUGGGCGGUUUCUGGGG | 123 | 2199 | CUGUGGGCGGUUUCUGGGG | 123 | 2217 | CCCCAGAAACCGCCCACAG | 286 |
| 2217 | GAUGUCCCAGGGUGGAACU | 124 | 2217 | GAUGUCCCAGGGUGGAACU | 124 | 2235 | AGUUCCACCCUGGGACAUC | 287 |
| 2235 | UCCACAUGCUGGUGCAUAU | 125 | 2235 | UCCACAUGCUGGUGCAUAU | 125 | 2253 | AUAUGCACCAGCAUGUGGA | 288 |
| 2253 | UACGCCCUUGAGCUACUUC | 126 | 2253 | UACGCCCUUGAGCUACUUC | 126 | 2271 | GAAGUAGCUCAAGGGCGUA | 289 |
| 2271 | CAAAUGUGGUUUAUACCUC | 127 | 2271 | CAAAUGUGGUUUAUACCUC | 127 | 2289 | GAGGUAUAAACCACAUUUG | 290 |
| 2289 | CGCAGAUACAAGAAUCUUU | 128 | 2289 | CGCAGAUACAAGAAUCUUU | 128 | 2307 | AAAGAUUCUUGUAUCUGCG | 291 |
| 2307 | UAUGAAUAUACAAUUCUUU | 129 | 2307 | UAUGAAUAUACAAUUCUUU | 129 | 2325 | AAAGAAUUGUAUAUUCAUA | 292 |
| 2325 | UUUCCUUCUACAGCUUAGC | 130 | 2325 | UUUCCUUCUACAGCUUAGC | 130 | 2343 | GCUAAGCUGUAGAAGGAAA | 293 |
| 2343 | CUCCGUCUUUUCAACCACG | 131 | 2343 | CUCCGUCUUUUCAACCACG | 131 | 2361 | CGUGGUUGAAAAGACGGAG | 294 |
| 2361 | GAACAUUUAAAACCCGACC | 132 | 2361 | GAACAUUUAAAACCCGACC | 132 | 2379 | GGUCGGGUUUUAAAUGUUC | 295 |
| 2379 | CUACUAGCACUGUUCUGUC | 133 | 2379 | CUACUAGCACUGUUCUGUC | 133 | 2397 | GACAGAACAGUGCUAGUAG | 296 |
| 2397 | CCUCAAGUACUCAAAUAUU | 134 | 2397 | CCUCAAGUACUCAAAUAUU | 134 | 2415 | AAUAUUUGAGUACUUGAGG | 297 |
| 2415 | UUCUGAUACUGCUGAGUCA | 135 | 2415 | UUCUGAUACUGCUGAGUCA | 135 | 2433 | UGACUCAGCAGUAUCAGAA | 298 |
| 2433 | AGACUGUCAGAAAAAGCUA | 136 | 2433 | AGACUGUCAGAAAAAGCUA | 136 | 2451 | UAGCUUUUUCUGACAGUCU | 299 |
| 2451 | AGCACUAACUCGUGUUUGG | 137 | 2451 | AGCACUAACUCGUGUUUGG | 137 | 2469 | CCAAACACGAGUUAGUGCU | 300 |
| 2469 | GAGCUCUAUCCAUAUUUUA | 138 | 2469 | GAGCUCUAUCCAUAUUUUA | 138 | 2487 | UAAAAUAUGGAUAGAGCUC | 301 |
| 2487 | ACUGAUCUCUUUAAGUAUU | 139 | 2487 | ACUGAUCUCUUUAAGUAUU | 139 | 2505 | AAUACUUAAAGAGAUCAGU | 302 |
| 2505 | UUGUUCCUGCCACUGUGUA | 140 | 2505 | UUGUUCCUGCCACUGUGUA | 140 | 2523 | UACACAGUGGCAGGAACAA | 303 |
| 2523 | ACUGUGGAGUUGACUCGGU | 141 | 2523 | ACUGUGGAGUUGACUCGGU | 141 | 2541 | ACCGAGUCAACUCCACAGU | 304 |
| 2541 | UGUUCUGUCCCAGUGCGGU | 142 | 2541 | UGUUCUGUCCCAGUGCGGU | 142 | 2559 | ACCGCACUGGGACAGAACA | 305 |
| 2559 | UGCCUCCUCUUGACUUCCC | 143 | 2559 | UGCCUCCUCUUGACUUCCC | 143 | 2577 | GGGAAGUCAAGAGGAGGCA | 306 |
| 2577 | CCACUGCUCUCUGUGGUGA | 144 | 2577 | CCACUGCUCUCUGUGGUGA | 144 | 2595 | UCACCACAGAGAGCAGUGG | 307 |
| 2595 | AGAAAUUUGCCUUGUUCAA | 145 | 2595 | AGAAAUUUGCCUUGUUCAA | 145 | 2613 | UUGAACAAGGCAAAUUUCU | 308 |
| 2613 | AUAAUUACUGUACCCUCGC | 146 | 2613 | AUAAUUACUGUACCCUCGC | 146 | 2631 | GCGAGGGUACAGUAAUUAU | 309 |
| 2631 | CAUGACUGUUACAGCUUUC | 147 | 2631 | CAUGACUGUUACAGCUUUC | 147 | 2649 | GAAAGCUGUAACAGUCAUG | 310 |
| 2649 | CUGUGCAGAGAUGACUGUC | 148 | 2649 | CUGUGCAGAGAUGACUGUC | 148 | 2667 | GACAGUCAUCUCUGCACAG | 311 |
| 2667 | CCAAGUGCCACAUGCCUAC | 149 | 2667 | CCAAGUGCCACAUGCCUAC | 149 | 2685 | GUAGGCAUGUGGCACUUGG | 312 |
| 2685 | CGAUUGAAAUGAAAACUCU | 150 | 2685 | CGAUUGAAAUGAAAACUCU | 150 | 2703 | AGAGUUUUCAUUUCAAUCG | 313 |
| 2703 | UAUUGUUACCUCUGAGUUG | 151 | 2703 | UAUUGUUACCUCUGAGUUG | 151 | 2721 | CAACUCAGAGGUAACAAUA | 314 |
| 2721 | GUGUUCCACGGAAAAUGCU | 152 | 2721 | GUGUUCCACGGAAAAUGCU | 152 | 2739 | AGCAUUUUCCGUGGAACAC | 315 |
| 2739 | UAUCCAGCAGAUCAUUUAG | 153 | 2739 | UAUCCAGCAGAUCAUUUAG | 153 | 2757 | CUAAAUGAUCUGCUGGAUA | 316 |
| 2757 | GGAAAAAUAAUUCUAUUUU | 154 | 2757 | GGAAAAAUAAUUCUAUUUU | 154 | 2775 | AAAAUAGAAUUAUUUUUCC | 317 |
| 2775 | UUAGCUUUUCAUUUCUCAG | 155 | 2775 | UUAGCUUUUCAUUUCUCAG | 155 | 2793 | CUGAGAAAUGAAAAGCUAA | 318 |
| 2793 | GCUGUCCUUUUUUCUUGUU | 156 | 2793 | GCUGUCCUUUUUUCUUGUU | 156 | 2811 | AACAAGAAAAAAGGACAGC | 319 |
| 2811 | UUGAUUUUUGACAGCAAUG | 157 | 2811 | UUGAUUUUUGACAGCAAUG | 157 | 2829 | CAUUGCUGUCAAAAAUCAA | 320 |
| 2829 | GGAGAAUGGGUUAUAUAAA | 158 | 2829 | GGAGAAUGGGUUAUAUAAA | 158 | 2847 | UUUAUAUAACCCAUUCUCC | 321 |
| 2847 | AGACUGCCUGCUAAUAUGA | 159 | 2847 | AGACUGCCUGCUAAUAUGA | 159 | 2865 | UCAUAUUAGCAGGCAGUCU | 322 |
| 2865 | AACAGAAAUGCAUUUGUAA | 160 | 2865 | AACAGAAAUGCAUUUGUAA | 160 | 2883 | UUACAAAUGCAUUUCUGUU | 323 |
| 2883 | AUUCAUGAAAAUAAAUGUA | 161 | 2883 | AUUCAUGAAAAUAAAUGUA | 161 | 2901 | UACAUUUAUUUUCAUGAAU | 324 |
| 2901 | ACAUCUUCUAUCUUCAAAA | 162 | 2901 | ACAUCUUCUAUCUUCAAAA | 162 | 2919 | UUUUGAAGAUAGAAGAUGU | 325 |
| 2913 | UUCAAAAAAAAAAAAAAAA | 163 | 2913 | UUCAAAAAAAAAAAAAAAA | 163 | 2931 | UUUUUUUUUUUUUUUUGAA | 326 |

| | | | | | | | | |
|---|---|---|---|---|---|---|---|---|
| | | Seq | | | Seq | | | Seq |
| Pos | Target Sequence | ID | UPos | Upper seq | ID | LPos | Lower seq | ID |

XM_055766.6 (MAPK3/ERK1)

| | | | | | | | | |
|---|---|---|---|---|---|---|---|---|
| 3 | CGGGGCCUCGGGCGGGGCC | 327 | 3 | CGGGGCCUCGGGCGGGGCC | 327 | 21 | GGCCCCGCCCGAGGCCCCG | 432 |
| 21 | CGCCGUGGGGAGGAGGGCG | 328 | 21 | CGCCGUGGGGAGGAGGGCG | 328 | 39 | CGCCCUCCUCCCCACGGCG | 433 |
| 39 | GGUGGGAGGGGAGGAGUGG | 329 | 39 | GGUGGGAGGGGAGGAGUGG | 329 | 57 | CCACUCCUCCCCUCCCACC | 434 |
| 57 | GAGAUGGCGGCGGCGGCGG | 330 | 57 | GAGAUGGCGGCGGCGGCGG | 330 | 75 | CCGCCGCCGCCGCCAUCUC | 435 |
| 75 | GCUCAGGGGGGCGGGGGCG | 331 | 75 | GCUCAGGGGGGCGGGGGCG | 331 | 93 | CGCCCCCGCCCCCCUGAGC | 436 |
| 93 | GGGGAGCCCCGUAGAACCG | 332 | 93 | GGGGAGCCCCGUAGAACCG | 332 | 111 | CGGUUCUACGGGGCUCCCC | 437 |
| 111 | GAGGGGGUCGGCCCGGGGG | 333 | 111 | GAGGGGGUCGGCCCGGGGG | 333 | 129 | CCCCCGGGCCGACCCCCUC | 438 |
| 129 | GUCCCGGGGGAGGUGGAGA | 334 | 129 | GUCCCGGGGGAGGUGGAGA | 334 | 147 | UCUCCACCUCCCCCGGGAC | 439 |
| 147 | AUGGUGAAGGGGCAGCCGU | 335 | 147 | AUGGUGAAGGGGCAGCCGU | 335 | 165 | ACGGCUGCCCCUUCACCAU | 440 |
| 165 | UUCGACGUGGGCCCGCGCU | 336 | 165 | UUCGACGUGGGCCCGCGCU | 336 | 183 | AGCGCGGGCCCACGUCGAA | 441 |
| 183 | UACACGCAGUUGCAGUACA | 337 | 183 | UACACGCAGUUGCAGUACA | 337 | 201 | UGUACUGCAACUGCGUGUA | 442 |
| 201 | AUCGGCGAGGGCGCGUACG | 338 | 201 | AUCGGCGAGGGCGCGUACG | 338 | 219 | CGUACGCGCCCUCGCCGAU | 443 |
| 219 | GGCAUGGUCAGCUCGGCCU | 339 | 219 | GGCAUGGUCAGCUCGGCCU | 339 | 237 | AGGCCGAGCUGACCAUGCC | 444 |
| 237 | UAUGACCACGUGCGCAAGA | 340 | 237 | UAUGACCACGUGCGCAAGA | 340 | 255 | UCUUGCGCACGUGGUCAUA | 445 |
| 255 | ACUCGCGUGGCCAUCAAGA | 341 | 255 | ACUCGCGUGGCCAUCAAGA | 341 | 273 | UCUUGAUGGCCACGCGAGU | 446 |
| 273 | AAGAUCAGCCCCUUCGAAC | 342 | 273 | AAGAUCAGCCCCUUCGAAC | 342 | 291 | GUUCGAAGGGGCUGAUCUU | 447 |
| 291 | CAUCAGACCUACUGCCAGC | 343 | 291 | CAUCAGACCUACUGCCAGC | 343 | 309 | GCUGGCAGUAGGUCUGAUG | 448 |
| 309 | CGCACGCUCCGGGAGAUCC | 344 | 309 | CGCACGCUCCGGGAGAUCC | 344 | 327 | GGAUCUCCCGGAGCGUGCG | 449 |
| 327 | CAGAUCCUGCUGCGCUUCC | 345 | 327 | CAGAUCCUGCUGCGCUUCC | 345 | 345 | GGAAGCGCAGCAGGAUCUG | 450 |
| 345 | CGCCAUGAGAAUGUCAUCG | 346 | 345 | CGCCAUGAGAAUGUCAUCG | 346 | 363 | CGAUGACAUUCUCAUGGCG | 451 |
| 363 | GGCAUCCGAGACAUUCUGC | 347 | 363 | GGCAUCCGAGACAUUCUGC | 347 | 381 | GCAGAAUGUCUCGGAUGCC | 452 |
| 381 | CGGGCGUCCACCCUGGAAG | 348 | 381 | CGGGCGUCCACCCUGGAAG | 348 | 399 | CUUCCAGGGUGGACGCCCG | 453 |
| 399 | GCCAUGAGAGAUGUCUACA | 349 | 399 | GCCAUGAGAGAUGUCUACA | 349 | 417 | UGUAGACAUCUCUCAUGGC | 454 |
| 417 | AUUGUGCAGGACCUGAUGG | 350 | 417 | AUUGUGCAGGACCUGAUGG | 350 | 435 | CCAUCAGGUCCUGCACAAU | 455 |
| 435 | GAGACUGACCUGUACAAGU | 351 | 435 | GAGACUGACCUGUACAAGU | 351 | 453 | ACUUGUACAGGUCAGUCUC | 456 |
| 453 | UUGCUGAAAAGCCAGCAGC | 352 | 453 | UUGCUGAAAAGCCAGCAGC | 352 | 471 | GCUGCUGGCUUUUCAGCAA | 457 |
| 471 | CUGAGCAAUGACCAUAUCU | 353 | 471 | CUGAGCAAUGACCAUAUCU | 353 | 489 | AGAUAUGGUCAUUGCUCAG | 458 |
| 489 | UGCUACUUCCUCUACCAGA | 354 | 489 | UGCUACUUCCUCUACCAGA | 354 | 507 | UCUGGUAGAGGAAGUAGCA | 459 |
| 507 | AUCCUGCGGGGCCUCAAGU | 355 | 507 | AUCCUGCGGGGCCUCAAGU | 355 | 525 | ACUUGAGGCCCCGCAGGAU | 460 |
| 525 | UACAUCCACUCCGCCAACG | 356 | 525 | UACAUCCACUCCGCCAACG | 356 | 543 | CGUUGGCGGAGUGGAUGUA | 461 |
| 543 | GUGCUCCACCGAGAUCUAA | 357 | 543 | GUGCUCCACCGAGAUCUAA | 357 | 561 | UUAGAUCUCGGUGGAGCAC | 462 |
| 561 | AAGCCCUCCAACCUGCUCA | 358 | 561 | AAGCCCUCCAACCUGCUCA | 358 | 579 | UGAGCAGGUUGGAGGGCUU | 463 |
| 579 | AUCAACACCACCUGCGACC | 359 | 579 | AUCAACACCACCUGCGACC | 359 | 597 | GGUCGCAGGUGGUGUUGAU | 464 |
| 597 | CUUAAGAUUUGUGAUUUCG | 360 | 597 | CUUAAGAUUUGUGAUUUCG | 360 | 615 | CGAAAUCACAAAUCUUAAG | 465 |
| 615 | GGCCUGGCCCGGAUUGCCG | 361 | 615 | GGCCUGGCCCGGAUUGCCG | 361 | 633 | CGGCAAUCCGGGCCAGGCC | 466 |
| 633 | GAUCCUGAGCAUGACCACA | 362 | 633 | GAUCCUGAGCAUGACCACA | 362 | 651 | UGUGGUCAUGCUCAGGAUC | 467 |
| 651 | ACCGGCUUCCUGACGGAGU | 363 | 651 | ACCGGCUUCCUGACGGAGU | 363 | 669 | ACUCCGUCAGGAAGCCGGU | 468 |
| 669 | UAUGUGGCUACGCGCUGGU | 364 | 669 | UAUGUGGCUACGCGCUGGU | 364 | 687 | ACCAGCGCGUAGCCACAUA | 469 |
| 687 | UACCGGGCCCCAGAGAUCA | 365 | 687 | UACCGGGCCCCAGAGAUCA | 365 | 705 | UGAUCUCUGGGGCCCGGUA | 470 |
| 705 | AUGCUGAACUCCAAGGGCU | 366 | 705 | AUGCUGAACUCCAAGGGCU | 366 | 723 | AGCCCUUGGAGUUCAGCAU | 471 |
| 723 | UAUACCAAGUCCAUCGACA | 367 | 723 | UAUACCAAGUCCAUCGACA | 367 | 741 | UGUCGAUGGACUUGGUAUA | 472 |
| 741 | AUCUGGUCUGUGGGCUGCA | 368 | 741 | AUCUGGUCUGUGGGCUGCA | 368 | 759 | UGCAGCCCACAGACCAGAU | 473 |
| 759 | AUUCUGGCUGAGAUGCUCU | 369 | 759 | AUUCUGGCUGAGAUGCUCU | 369 | 777 | AGAGCAUCUCAGCCAGAAU | 474 |
| 777 | UCUAACCGGCCCAUCUUCC | 370 | 777 | UCUAACCGGCCCAUCUUCC | 370 | 795 | GGAAGAUGGGCCGGUUAGA | 475 |
| 795 | CCUGGCAAGCACUACCUGG | 371 | 795 | CCUGGCAAGCACUACCUGG | 371 | 813 | CCAGGUAGUGCUUGCCAGG | 476 |
| 813 | GAUCAGCUCAACCACAUUC | 372 | 813 | GAUCAGCUCAACCACAUUC | 372 | 831 | GAAUGUGGUUGAGCUGAUC | 477 |
| 831 | CUGGGCAUCCUGGGCUCCC | 373 | 831 | CUGGGCAUCCUGGGCUCCC | 373 | 849 | GGGAGCCCAGGAUGCCCAG | 478 |
| 849 | CCAUCCCAGGAGGACCUGA | 374 | 849 | CCAUCCCAGGAGGACCUGA | 374 | 867 | UCAGGUCCUCCUGGGAUGG | 479 |
| 867 | AAUUGUAUCAUCAACAUGA | 375 | 867 | AAUUGUAUCAUCAACAUGA | 375 | 885 | UCAUGUUGAUGAUACAAUU | 480 |
| 885 | AAGGCCCGAAACUACCUAC | 376 | 885 | AAGGCCCGAAACUACCUAC | 376 | 903 | GUAGGUAGUUUCGGGCCUU | 481 |
| 903 | CAGUCUCUGCCCUCCAAGA | 377 | 903 | CAGUCUCUGCCCUCCAAGA | 377 | 921 | UCUUGGAGGGCAGAGACUG | 482 |
| 921 | ACCAAGGUGGCUUGGGCCA | 378 | 921 | ACCAAGGUGGCUUGGGCCA | 378 | 939 | UGGCCCAAGCCACCUUGGU | 483 |
| 939 | AAGCUUUUCCCCAAGUCAG | 379 | 939 | AAGCUUUUCCCCAAGUCAG | 379 | 957 | CUGACUUGGGGAAAAGCUU | 484 |
| 957 | GACUCCAAAGCCCUUGACC | 380 | 957 | GACUCCAAAGCCCUUGACC | 380 | 975 | GGUCAAGGGCUUUGGAGUC | 485 |
| 975 | CUGCUGGACCGGAUGUUAA | 381 | 975 | CUGCUGGACCGGAUGUUAA | 381 | 993 | UUAACAUCCGGUCCAGCAG | 486 |
| 993 | ACCUUUAACCCCAAUAAAC | 382 | 993 | ACCUUUAACCCCAAUAAAC | 382 | 1011 | GUUUAUUGGGGUUAAAGGU | 487 |
| 1011 | CGGAUCACAGUGGAGGAAG | 383 | 1011 | CGGAUCACAGUGGAGGAAG | 383 | 1029 | CUUCCUCCACUGUGAUCCG | 488 |
| 1029 | GCGCUGGCUCACCCCUACC | 384 | 1029 | GCGCUGGCUCACCCCUACC | 384 | 1047 | GGUAGGGGUGAGCCAGCGC | 489 |
| 1047 | CUGGAGCAGUACUAUGACC | 385 | 1047 | CUGGAGCAGUACUAUGACC | 385 | 1065 | GGUCAUAGUACUGCUCCAG | 490 |
| 1065 | CCGACGGAUGAGCCAGUGG | 386 | 1065 | CCGACGGAUGAGCCAGUGG | 386 | 1083 | CCACUGGCUCAUCCGUCGG | 491 |
| 1083 | GCCGAGGAGCCCUUCACCU | 387 | 1083 | GCCGAGGAGCCCUUCACCU | 387 | 1101 | AGGUGAAGGGCUCCUCGGC | 492 |
| 1101 | UUCGCCAUGGAGCUGGAUG | 388 | 1101 | UUCGCCAUGGAGCUGGAUG | 388 | 1119 | CAUCCAGCUCCAUGGCGAA | 493 |
| 1119 | GACCUACCUAAGGAGCGGC | 389 | 1119 | GACCUACCUAAGGAGCGGC | 389 | 1137 | GCCGCUCCUUAGGUAGGUC | 494 |
| 1137 | CUGAAGGAGCUCAUCUUCC | 390 | 1137 | CUGAAGGAGCUCAUCUUCC | 390 | 1155 | GGAAGAUGAGCUCCUUCAG | 495 |
| 1155 | CAGGAGACAGCACGCUUCC | 391 | 1155 | CAGGAGACAGCACGCUUCC | 391 | 1173 | GGAAGCGUGCUGUCUCCUG | 496 |
| 1173 | CAGCCCGGAGUGCUGGAGG | 392 | 1173 | CAGCCCGGAGUGCUGGAGG | 392 | 1191 | CCUCCAGCACUCCGGGCUG | 497 |
| 1191 | GCCCCCUAGCCCAGACAGA | 393 | 1191 | GCCCCCUAGCCCAGACAGA | 393 | 1209 | UCUGUCUGGGCUAGGGGGC | 498 |
| 1209 | ACAUCUCUGCACCCUGGGG | 394 | 1209 | ACAUCUCUGCACCCUGGGG | 394 | 1227 | CCCCAGGGUGCAGAGAUGU | 499 |
| 1227 | GCCUGGAACAGAACUGGCA | 395 | 1227 | GCCUGGAACAGAACUGGCA | 395 | 1245 | UGCCAGUUCUGUUCCAGGC | 500 |
| 1245 | AAAGAGGCAAGAGGUCACU | 396 | 1245 | AAAGAGGCAAGAGGUCACU | 396 | 1263 | AGUGACCUCUUGCCUCUUU | 501 |
| 1263 | UGAGGGCCUCUGUCACCCA | 397 | 1263 | UGAGGGCCUCUGUCACCCA | 397 | 1281 | UGGGUGACAGAGGCCCUCA | 502 |
| 1281 | AGGACCUGCCUCCUGCCUG | 398 | 1281 | AGGACCUGCCUCCUGCCUG | 398 | 1299 | CAGGCAGGAGGCAGGUCCU | 503 |
| 1299 | GCCCCUCUCCCGCCAGACU | 399 | 1299 | GCCCCUCUCCCGCCAGACU | 399 | 1317 | AGUCUGGCGGGAGAGGGGC | 504 |
| 1317 | UGUUAGAAAAUGGACACUG | 400 | 1317 | UGUUAGAAAAUGGACACUG | 400 | 1335 | CAGUGUCCAUUUUCUAACA | 505 |
| 1335 | GUGCCCAGCCCGGACCUUG | 401 | 1335 | GUGCCCAGCCCGGACCUUG | 401 | 1353 | CAAGGUCCGGGCUGGGCAC | 506 |
| 1353 | GGCAGCCCAGGCCGGGGUG | 402 | 1353 | GGCAGCCCAGGCCGGGGUG | 402 | 1371 | CACCCCGGCCUGGGCUGCC | 507 |
| 1371 | GGAGCAUGGGCCUGGCCAC | 403 | 1371 | GGAGCAUGGGCCUGGCCAC | 403 | 1389 | GUGGCCAGGCCCAUGCUCC | 508 |
| 1389 | CCUCUCUCCUUUGCUGAGG | 404 | 1389 | CCUCUCUCCUUUGCUGAGG | 404 | 1407 | CCUCAGCAAAGGAGAGAGG | 509 |
| 1407 | GCCUCCAGCUUCAGGCAGG | 405 | 1407 | GCCUCCAGCUUCAGGCAGG | 405 | 1425 | CCUGCCUGAAGCUGGAGGC | 510 |
| 1425 | GCCAAGGCCUUCUCCUCCC | 406 | 1425 | GCCAAGGCCUUCUCCUCCC | 406 | 1443 | GGGAGGAGAAGGCCUUGGC | 511 |
| 1443 | CCACCCGCCCUCCCCACGG | 407 | 1443 | CCACCCGCCCUCCCCACGG | 407 | 1461 | CCGUGGGGAGGGCGGGUGG | 512 |
| 1461 | GGGCCUCGGGACCUCAGGU | 408 | 1461 | GGGCCUCGGGACCUCAGGU | 408 | 1479 | ACCUGAGGUCCCGAGGCCC | 513 |
| 1479 | UGGCCCCAGUUCAAUCUCC | 409 | 1479 | UGGCCCCAGUUCAAUCUCC | 409 | 1497 | GGAGAUUGAACUGGGGCCA | 514 |
| 1497 | CCGCUGCUGCUGCUGCGCC | 410 | 1497 | CCGCUGCUGCUGCUGCGCC | 410 | 1515 | GGCGCAGCAGCAGCAGCGG | 515 |
| 1515 | CCUUACCUUCCCCAGCGUC | 411 | 1515 | CCUUACCUUCCCCAGCGUC | 411 | 1533 | GACGCUGGGGAAGGUAAGG | 516 |
| 1533 | CCCAGUCUCUGGCAGUUCU | 412 | 1533 | CCCAGUCUCUGGCAGUUCU | 412 | 1551 | AGAACUGCCAGAGACUGGG | 517 |
| 1551 | UGGAAUGGAAGGGUUCUGG | 413 | 1551 | UGGAAUGGAAGGGUUCUGG | 413 | 1569 | CCAGAACCCUUCCAUUCCA | 518 |
| 1569 | GCUGCCCCAACCUGCUGAA | 414 | 1569 | GCUGCCCCAACCUGCUGAA | 414 | 1587 | UUCAGCAGGUUGGGGCAGC | 519 |
| 1587 | AGGGCAGAGGUGGAGGGUG | 415 | 1587 | AGGGCAGAGGUGGAGGGUG | 415 | 1605 | CACCCUCCACCUCUGCCCU | 520 |
| 1605 | GGGGGGCGCUGAGUAGGGA | 416 | 1605 | GGGGGGCGCUGAGUAGGGA | 416 | 1623 | UCCCUACUCAGCGCCCCCC | 521 |
| 1623 | ACUCAGGGCCAUGCCUGCC | 417 | 1623 | ACUCAGGGCCAUGCCUGCC | 417 | 1641 | GGCAGGCAUGGCCCUGAGU | 522 |
| 1641 | CCCCCUCAUCUCAUUCAAA | 418 | 1641 | CCCCCUCAUCUCAUUCAAA | 418 | 1659 | UUUGAAUGAGAUGAGGGGG | 523 |
| 1659 | ACCCCACCCUAGUUUCCCU | 419 | 1659 | ACCCCACCCUAGUUUCCCU | 419 | 1677 | AGGGAAACUAGGGUGGGGU | 524 |
| 1677 | UGAAGGAACAUUCCUUAGU | 420 | 1677 | UGAAGGAACAUUCCUUAGU | 420 | 1695 | ACUAAGGAAUGUUCCUUCA | 525 |
| 1695 | UCUCAAGGGCUAGCAUCCC | 421 | 1695 | UCUCAAGGGCUAGCAUCCC | 421 | 1713 | GGGAUGCUAGCCCUUGAGA | 526 |
| 1713 | CUGAGGAGCCAGGCCGGGC | 422 | 1713 | CUGAGGAGCCAGGCCGGGC | 422 | 1731 | GCCCGGCCUGGCUCCUCAG | 527 |
| 1731 | CCGAAUCCCCUCCCUGUCA | 423 | 1731 | CCGAAUCCCCUCCCUGUCA | 423 | 1749 | UGACAGGGAGGGGAUUCGG | 528 |
| 1749 | AAAGCUGUCACUUCGCGUG | 424 | 1749 | AAAGCUGUCACUUCGCGUG | 424 | 1767 | CACGCGAAGUGACAGCUUU | 529 |
| 1767 | GCCCUCGCUGCUUCUGUGU | 425 | 1767 | GCCCUCGCUGCUUCUGUGU | 425 | 1785 | ACACAGAAGCAGCGAGGGC | 530 |
| 1785 | UGUGGUGAGCAGAAGUGGA | 426 | 1785 | UGUGGUGAGCAGAAGUGGA | 426 | 1803 | UCCACUUCUGCUCACCACA | 531 |
| 1803 | AGCUGGGGGGCGUGGAGAG | 427 | 1803 | AGCUGGGGGGCGUGGAGAG | 427 | 1821 | CUCUCCACGCCCCCCAGCU | 532 |
| 1821 | GCCCGGCGCCCCUGCCACC | 428 | 1821 | GCCCGGCGCCCCUGCCACC | 428 | 1839 | GGUGGCAGGGGCGCCGGGC | 533 |
| 1839 | CUCCCUGACCCGUCUAAUA | 429 | 1839 | CUCCCUGACCCGUCUAAUA | 429 | 1857 | UAUUAGACGGGUCAGGGAG | 534 |
| 1857 | AUAUAAAUAUAGAGAUGUG | 430 | 1857 | AUAUAAAUAUAGAGAUGUG | 430 | 1875 | CACAUCUCUAUAUUUAUAU | 535 |
| 1865 | AUAGAGAUGUGUCUAUGGC | 431 | 1865 | AUAGAGAUGUGUCUAUGGC | 431 | 1883 | GCCAUAGACACAUCUCUAU | 536 |

| | | | | | | | | |
|---|---|---|---|---|---|---|---|---|
| | | ID | | | Seq | | | Seq |
| Pos | Target Sequence | Seq | UPos | Upper seq | ID | LPos | Lower seq | ID |

NM_002750 (MAPK8/JNK1)

| | | | | | | | | |
|---|---|---|---|---|---|---|---|---|
| 3 | UAAUUGCUUGCCAUCAUGA | 537 | 3 | UAAUUGCUUGCCAUCAUGA | 537 | 21 | UCAUGAUGGCAAGCAAUUA | 616 |
| 21 | AGCAGAAGCAAGCGUGACA | 538 | 21 | AGCAGAAGCAAGCGUGACA | 538 | 39 | UGUCACGCUUGCUUCUGCU | 617 |
| 39 | AACAAUUUUUAUAGUGUAG | 539 | 39 | AACAAUUUUUAUAGUGUAG | 539 | 57 | CUACACUAUAAAAAUUGUU | 618 |
| 57 | GAGAUUGGAGAUUCUACAU | 540 | 57 | GAGAUUGGAGAUUCUACAU | 540 | 75 | AUGUAGAAUCUCCAAUCUC | 619 |
| 75 | UUCACAGUCCUGAAACGAU | 541 | 75 | UUCACAGUCCUGAAACGAU | 541 | 93 | AUCGUUUCAGGACUGUGAA | 620 |
| 93 | UAUCAGAAUUUAAAACCUA | 542 | 93 | UAUCAGAAUUUAAAACCUA | 542 | 111 | UAGGUUUUAAAUUCUGAUA | 621 |
| 111 | AUAGGCUCAGGAGCUCAAG | 543 | 111 | AUAGGCUCAGGAGCUCAAG | 543 | 129 | CUUGAGCUCCUGAGCCUAU | 622 |
| 129 | GGAAUAGUAUGCGCAGCUU | 544 | 129 | GGAAUAGUAUGCGCAGCUU | 544 | 147 | AAGCUGCGCAUACUAUUCC | 623 |
| 147 | UAUGAUGCCAUUCUUGAAA | 545 | 147 | UAUGAUGCCAUUCUUGAAA | 545 | 165 | UUUCAAGAAUGGCAUCAUA | 624 |
| 165 | AGAAAUGUUGCAAUCAAGA | 546 | 165 | AGAAAUGUUGCAAUCAAGA | 546 | 183 | UCUUGAUUGCAACAUUUCU | 625 |
| 183 | AAGCUAAGCCGACCAUUUC | 547 | 183 | AAGCUAAGCCGACCAUUUC | 547 | 201 | GAAAUGGUCGGCUUAGCUU | 626 |
| 201 | CAGAAUCAGACUCAUGCCA | 548 | 201 | CAGAAUCAGACUCAUGCCA | 548 | 219 | UGGCAUGAGUCUGAUUCUG | 627 |
| 219 | AAGCGGGCCUACAGAGAGC | 549 | 219 | AAGCGGGCCUACAGAGAGC | 549 | 237 | GCUCUCUGUAGGCCCGCUU | 628 |
| 237 | CUAGUUCUUAUGAAAUGUG | 550 | 237 | CUAGUUCUUAUGAAAUGUG | 550 | 255 | CACAUUUCAUAAGAACUAG | 629 |
| 255 | GUUAAUCACAAAAAUAUAA | 551 | 255 | GUUAAUCACAAAAAUAUAA | 551 | 273 | UUAUAUUUUUGUGAUUAAC | 630 |
| 273 | AUUGGCCUUUUGAAUGUUU | 552 | 273 | AUUGGCCUUUUGAAUGUUU | 552 | 291 | AAACAUUCAAAAGGCCAAU | 631 |
| 291 | UUCACACCACAGAAAUCCC | 553 | 291 | UUCACACCACAGAAAUCCC | 553 | 309 | GGGAUUUCUGUGGUGUGAA | 632 |
| 309 | CUAGAAGAAUUUCAAGAUG | 554 | 309 | CUAGAAGAAUUUCAAGAUG | 554 | 327 | CAUCUUGAAAUUCUUCUAG | 633 |
| 327 | GUUUACAUAGUCAUGGAGC | 555 | 327 | GUUUACAUAGUCAUGGAGC | 555 | 345 | GCUCCAUGACUAUGUAAAC | 634 |
| 345 | CUCAUGGAUGCAAAUCUUU | 556 | 345 | CUCAUGGAUGCAAAUCUUU | 556 | 363 | AAAGAUUUGCAUCCAUGAG | 635 |
| 363 | UGCCAAGUGAUUCAGAUGG | 557 | 363 | UGCCAAGUGAUUCAGAUGG | 557 | 381 | CCAUCUGAAUCACUUGGCA | 636 |
| 381 | GAGCUAGAUCAUGAAAGAA | 558 | 381 | GAGCUAGAUCAUGAAAGAA | 558 | 399 | UUCUUUCAUGAUCUAGCUC | 637 |
| 399 | AUGUCCUACCUUCUCUAUC | 559 | 399 | AUGUCCUACCUUCUCUAUC | 559 | 417 | GAUAGAGAAGGUAGGACAU | 638 |
| 417 | CAGAUGCUGUGUGGAAUCA | 560 | 417 | CAGAUGCUGUGUGGAAUCA | 560 | 435 | UGAUUCCACACAGCAUCUG | 639 |
| 435 | AAGCACCUUCAUUCUGCUG | 561 | 435 | AAGCACCUUCAUUCUGCUG | 561 | 453 | CAGCAGAAUGAAGGUGCUU | 640 |
| 453 | GGAAUUAUUCAUCGGGACU | 562 | 453 | GGAAUUAUUCAUCGGGACU | 562 | 471 | AGUCCCGAUGAAUAAUUCC | 641 |
| 471 | UUAAAGCCCAGUAAUAUAG | 563 | 471 | UUAAAGCCCAGUAAUAUAG | 563 | 489 | CUAUAUUACUGGGCUUUAA | 642 |
| 489 | GUAGUAAAAUCUGAUUGCA | 564 | 489 | GUAGUAAAAUCUGAUUGCA | 564 | 507 | UGCAAUCAGAUUUUACUAC | 643 |
| 507 | ACUUUGAAGAUUCUUGACU | 565 | 507 | ACUUUGAAGAUUCUUGACU | 565 | 525 | AGUCAAGAAUCUUCAAAGU | 644 |
| 525 | UUCGGUCUGGCCAGGACUG | 566 | 525 | UUCGGUCUGGCCAGGACUG | 566 | 543 | CAGUCCUGGCCAGACCGAA | 645 |
| 543 | GCAGGAACGAGUUUUAUGA | 567 | 543 | GCAGGAACGAGUUUUAUGA | 567 | 561 | UCAUAAAACUCGUUCCUGC | 646 |
| 561 | AUGACGCCUUAUGUAGUGA | 568 | 561 | AUGACGCCUUAUGUAGUGA | 568 | 579 | UCACUACAUAAGGCGUCAU | 647 |
| 579 | ACUCGCUACUACAGAGCAC | 569 | 579 | ACUCGCUACUACAGAGCAC | 569 | 597 | GUGCUCUGUAGUAGCGAGU | 648 |
| 597 | CCCGAGGUCAUCCUUGGCA | 570 | 597 | CCCGAGGUCAUCCUUGGCA | 570 | 615 | UGCCAAGGAUGACCUCGGG | 649 |
| 615 | AUGGGCUACAAGGAAAACG | 571 | 615 | AUGGGCUACAAGGAAAACG | 571 | 633 | CGUUUUCCUUGUAGCCCAU | 650 |
| 633 | GUGGAUUUAUGGUCUGUGG | 572 | 633 | GUGGAUUUAUGGUCUGUGG | 572 | 651 | CCACAGACCAUAAAUCCAC | 651 |
| 651 | GGGUGCAUUAUGGGAGAAA | 573 | 651 | GGGUGCAUUAUGGGAGAAA | 573 | 669 | UUUCUCCCAUAAUGCACCC | 652 |
| 669 | AUGGUUUGCCACAAAAUCC | 574 | 669 | AUGGUUUGCCACAAAAUCC | 574 | 687 | GGAUUUUGUGGCAAACCAU | 653 |
| 687 | CUCUUUCCAGGAAGGGACU | 575 | 687 | CUCUUUCCAGGAAGGGACU | 575 | 705 | AGUCCCUUCCUGGAAAGAG | 654 |
| 705 | UAUAUUGAUCAGUGGAAUA | 576 | 705 | UAUAUUGAUCAGUGGAAUA | 576 | 723 | UAUUCCACUGAUCAAUAUA | 655 |
| 723 | AAAGUUAUUGAACAGCUUG | 577 | 723 | AAAGUUAUUGAACAGCUUG | 577 | 741 | CAAGCUGUUCAAUAACUUU | 656 |
| 741 | GGAACACCAUGUCCUGAAU | 578 | 741 | GGAACACCAUGUCCUGAAU | 578 | 759 | AUUCAGGACAUGGUGUUCC | 657 |
| 759 | UUCAUGAAGAAACUGCAAC | 579 | 759 | UUCAUGAAGAAACUGCAAC | 579 | 777 | GUUGCAGUUUCUUCAUGAA | 658 |
| 777 | CCAACAGUAAGGACUUACG | 580 | 777 | CCAACAGUAAGGACUUACG | 580 | 795 | CGUAAGUCCUUACUGUUGG | 659 |
| 795 | GUUGAAAACAGACCUAAAU | 581 | 795 | GUUGAAAACAGACCUAAAU | 581 | 813 | AUUUAGGUCUGUUUUCAAC | 660 |
| 813 | UAUGCUGGAUAUAGCUUUG | 582 | 813 | UAUGCUGGAUAUAGCUUUG | 582 | 831 | CAAAGCUAUAUCCAGCAUA | 661 |
| 831 | GAGAAACUCUUCCCUGAUG | 583 | 831 | GAGAAACUCUUCCCUGAUG | 583 | 849 | CAUCAGGGAAGAGUUUCUC | 662 |
| 849 | GUCCUUUUCCCAGCUGACU | 584 | 849 | GUCCUUUUCCCAGCUGACU | 584 | 867 | AGUCAGCUGGGAAAAGGAC | 663 |
| 867 | UCAGAACACAACAAACUUA | 585 | 867 | UCAGAACACAACAAACUUA | 585 | 885 | UAAGUUUGUUGUGUUCUGA | 664 |
| 885 | AAAGCCAGUCAGGCAAGGG | 586 | 885 | AAAGCCAGUCAGGCAAGGG | 586 | 903 | CCCUUGCCUGACUGGCUUU | 665 |
| 903 | GAUUUGUUAUCCAAAAUGC | 587 | 903 | GAUUUGUUAUCCAAAAUGC | 587 | 921 | GCAUUUUGGAUAACAAAUC | 666 |
| 921 | CUGGUAAUAGAUGCAUCUA | 588 | 921 | CUGGUAAUAGAUGCAUCUA | 588 | 939 | UAGAUGCAUCUAUUACCAG | 667 |
| 939 | AAAAGGAUCUCUGUAGAUG | 589 | 939 | AAAAGGAUCUCUGUAGAUG | 589 | 957 | CAUCUACAGAGAUCCUUUU | 668 |
| 957 | GAAGCUCUCCAACACCCGU | 590 | 957 | GAAGCUCUCCAACACCCGU | 590 | 975 | ACGGGUGUUGGAGAGCUUC | 669 |
| 975 | UACAUCAAUGUCUGGUAUG | 591 | 975 | UACAUCAAUGUCUGGUAUG | 591 | 993 | CAUACCAGACAUUGAUGUA | 670 |
| 993 | GAUCCUUCUGAAGCAGAAG | 592 | 993 | GAUCCUUCUGAAGCAGAAG | 592 | 1011 | CUUCUGCUUCAGAAGGAUC | 671 |
| 1011 | GCUCCACCACCAAAGAUCC | 593 | 1011 | GCUCCACCACCAAAGAUCC | 593 | 1029 | GGAUCUUUGGUGGUGGAGC | 672 |
| 1029 | CCUGACAAGCAGUUAGAUG | 594 | 1029 | CCUGACAAGCAGUUAGAUG | 594 | 1047 | CAUCUAACUGCUUGUCAGG | 673 |
| 1047 | GAAAGGGAACACACAAUAG | 595 | 1047 | GAAAGGGAACACACAAUAG | 595 | 1065 | CUAUUGUGUGUUCCCUUUC | 674 |
| 1065 | GAAGAGUGGAAAGAAUUGA | 596 | 1065 | GAAGAGUGGAAAGAAUUGA | 596 | 1083 | UCAAUUCUUUCCACUCUUC | 675 |
| 1083 | AUAUAUAAGGAAGUUAUGG | 597 | 1083 | AUAUAUAAGGAAGUUAUGG | 597 | 1101 | CCAUAACUUCCUUAUAUAU | 676 |
| 1101 | GACUUGGAGGAGAGAACCA | 598 | 1101 | GACUUGGAGGAGAGAACCA | 598 | 1119 | UGGUUCUCUCCUCCAAGUC | 677 |
| 1119 | AAGAAUGGAGUUAUACGGG | 599 | 1119 | AAGAAUGGAGUUAUACGGG | 599 | 1137 | CCCGUAUAACUCCAUUCUU | 678 |
| 1137 | GGGCAGCCCUCUCCUUUAG | 600 | 1137 | GGGCAGCCCUCUCCUUUAG | 600 | 1155 | CUAAAGGAGAGGGCUGCCC | 679 |
| 1155 | GCACAGGUGCAGCAGUGAU | 601 | 1155 | GCACAGGUGCAGCAGUGAU | 601 | 1173 | AUCACUGCUGCACCUGUGC | 680 |
| 1173 | UCAAUGGCUCUCAGCAUCC | 602 | 1173 | UCAAUGGCUCUCAGCAUCC | 602 | 1191 | GGAUGCUGAGAGCCAUUGA | 681 |
| 1191 | CAUCAUCAUCGUCGUCUGU | 603 | 1191 | CAUCAUCAUCGUCGUCUGU | 603 | 1209 | ACAGACGACGAUGAUGAUG | 682 |
| 1209 | UCAAUGAUGUGUCUUCAAU | 604 | 1209 | UCAAUGAUGUGUCUUCAAU | 604 | 1227 | AUUGAAGACACAUCAUUGA | 683 |
| 1227 | UGUCAACAGAUCCGACUUU | 605 | 1227 | UGUCAACAGAUCCGACUUU | 605 | 1245 | AAAGUCGGAUCUGUUGACA | 684 |
| 1245 | UGGCCUCUGAUACAGACAG | 606 | 1245 | UGGCCUCUGAUACAGACAG | 606 | 1263 | CUGUCUGUAUCAGAGGCCA | 685 |
| 1263 | GCAGUCUAGAAGCAGCAGC | 607 | 1263 | GCAGUCUAGAAGCAGCAGC | 607 | 1281 | GCUGCUGCUUCUAGACUGC | 686 |
| 1281 | CUGGGCCUCUGGGCUGCUG | 608 | 1281 | CUGGGCCUCUGGGCUGCUG | 608 | 1299 | CAGCAGCCCAGAGGCCCAG | 687 |
| 1299 | GUAGAUGACUACUUGGGCC | 609 | 1299 | GUAGAUGACUACUUGGGCC | 609 | 1317 | GGCCCAAGUAGUCAUCUAC | 688 |
| 1317 | CAUCGGGGGGUGGGAGGGA | 610 | 1317 | CAUCGGGGGGUGGGAGGGA | 610 | 1335 | UCCCUCCCACCCCCCGAUG | 689 |
| 1335 | AUGGGGAGUCGGUUAGUCA | 611 | 1335 | AUGGGGAGUCGGUUAGUCA | 611 | 1353 | UGACUAACCGACUCCCCAU | 690 |
| 1353 | AUUGAUAGAACUACUUUGA | 612 | 1353 | AUUGAUAGAACUACUUUGA | 612 | 1371 | UCAAAGUAGUUCUAUCAAU | 691 |
| 1371 | AAAACAAUUCAGUGGUCUU | 613 | 1371 | AAAACAAUUCAGUGGUCUU | 613 | 1389 | AAGACCACUGAAUUGUUUU | 692 |
| 1389 | UAUUUUUGGGUGAUUUUUC | 614 | 1389 | UAUUUUUGGGUGAUUUUUC | 614 | 1407 | GAAAAAUCACCCAAAAAUA | 693 |
| 1397 | GGUGAUUUUUCAAAAAAUG | 615 | 1397 | GGUGAUUUUUCAAAAAAUG | 615 | 1415 | CAUUUUUUGAAAAAUCACC | 694 |

| | | | | | | | | |
|---|---|---|---|---|---|---|---|---|
| | | ID | | | Seq | | | Seq |
| Pos | Target Sequence | Seq | UPos | Upper seq | ID | LPos | Lower seq | ID |

NM_139012 (MAPK14/p38)

| | | | | | | | | |
|---|---|---|---|---|---|---|---|---|
| 3 | AACCGCGACCACUGGAGCC | 695 | 3 | AACCGCGACCACUGGAGCC | 695 | 21 | GGCUCCAGUGGUCGCGGUU | 904 |
| 21 | CUUAGCGGGCGCAGCAGCU | 696 | 21 | CUUAGCGGGCGCAGCAGCU | 696 | 39 | AGCUGCUGCGCCCGCUAAG | 905 |
| 39 | UGGAACGGGAGUACUGCGA | 697 | 39 | UGGAACGGGAGUACUGCGA | 697 | 57 | UCGCAGUACUCCCGUUCCA | 906 |
| 57 | ACGCAGCCCGGAGUCGGCC | 698 | 57 | ACGCAGCCCGGAGUCGGCC | 698 | 75 | GGCCGACUCCGGGCUGCGU | 907 |
| 75 | CUUGUAGGGGCGAAGGUGC | 699 | 75 | CUUGUAGGGGCGAAGGUGC | 699 | 93 | GCACCUUCGCCCCUACAAG | 908 |
| 93 | CAGGGAGAUCGCGGCGGGC | 700 | 93 | CAGGGAGAUCGCGGCGGGC | 700 | 111 | GCCCGCCGCGAUCUCCCUG | 909 |
| 111 | CGCAGUCUUGAGCGCCGGA | 701 | 111 | CGCAGUCUUGAGCGCCGGA | 701 | 129 | UCCGGCGCUCAAGACUGCG | 910 |
| 129 | AGCGCGUCCCUGCCCUUAG | 702 | 129 | AGCGCGUCCCUGCCCUUAG | 702 | 147 | CUAAGGGCAGGGACGCGCU | 911 |
| 147 | GCGGGGCUUGCCCCAGUCG | 703 | 147 | GCGGGGCUUGCCCCAGUCG | 703 | 165 | CGACUGGGGCAAGCCCCGC | 912 |
| 165 | GCAGGGGCACAUCCAGCCG | 704 | 165 | GCAGGGGCACAUCCAGCCG | 704 | 183 | CGGCUGGAUGUGCCCCUGC | 913 |
| 183 | GCUGCGGCUGACAGCAGCC | 705 | 183 | GCUGCGGCUGACAGCAGCC | 705 | 201 | GGCUGCUGUCAGCCGCAGC | 914 |
| 201 | CGCGCGCGCGGGAGUCUGC | 706 | 201 | CGCGCGCGCGGGAGUCUGC | 706 | 219 | GCAGACUCCCGCGCGCGCG | 915 |
| 219 | CGGGGUCGCGGCAGCCGCA | 707 | 219 | CGGGGUCGCGGCAGCCGCA | 707 | 237 | UGCGGCUGCCGCGACCCCG | 916 |
| 237 | ACCUGCGCGGGCGACCAGC | 708 | 237 | ACCUGCGCGGGCGACCAGC | 708 | 255 | GCUGGUCGCCCGCGCAGGU | 917 |
| 255 | CGCAAGGUCCCCGCCCGGC | 709 | 255 | CGCAAGGUCCCCGCCCGGC | 709 | 273 | GCCGGGCGGGGACCUUGCG | 918 |
| 273 | CUGGGCGGGCAGCAAGGGC | 710 | 273 | CUGGGCGGGCAGCAAGGGC | 710 | 291 | GCCCUUGCUGCCCGCCCAG | 919 |
| 291 | CCGGGGAGAGGGUGCGGGU | 711 | 291 | CCGGGGAGAGGGUGCGGGU | 711 | 309 | ACCCGCACCCUCUCCCCGG | 920 |
| 309 | UGCAGGCGGGGGCCCCACA | 712 | 309 | UGCAGGCGGGGGCCCCACA | 712 | 327 | UGUGGGGCCCCCGCCUGCA | 921 |
| 327 | AGGGCCACCUUCUUGCCCG | 713 | 327 | AGGGCCACCUUCUUGCCCG | 713 | 345 | CGGGCAAGAAGGUGGCCCU | 922 |
| 345 | GGCGGCUGCCGCUGGAAAA | 714 | 345 | GGCGGCUGCCGCUGGAAAA | 714 | 363 | UUUUCCAGCGGCAGCCGCC | 923 |
| 363 | AUGUCUCAGGAGAGGCCCA | 715 | 363 | AUGUCUCAGGAGAGGCCCA | 715 | 381 | UGGGCCUCUCCUGAGACAU | 924 |
| 381 | ACGUUCUACCGGCAGGAGC | 716 | 381 | ACGUUCUACCGGCAGGAGC | 716 | 399 | GCUCCUGCCGGUAGAACGU | 925 |
| 399 | CUGAACAAGACAAUCUGGG | 717 | 399 | CUGAACAAGACAAUCUGGG | 717 | 417 | CCCAGAUUGUCUUGUUCAG | 926 |
| 417 | GAGGUGCCCGAGCGUUACC | 718 | 417 | GAGGUGCCCGAGCGUUACC | 718 | 435 | GGUAACGCUCGGGCACCUC | 927 |
| 435 | CAGAACCUGUCUCCAGUGG | 719 | 435 | CAGAACCUGUCUCCAGUGG | 719 | 453 | CCACUGGAGACAGGUUCUG | 928 |
| 453 | GGCUCUGGCGCCUAUGGCU | 720 | 453 | GGCUCUGGCGCCUAUGGCU | 720 | 471 | AGCCAUAGGCGCCAGAGCC | 929 |
| 471 | UCUGUGUGUGCUGCUUUUG | 721 | 471 | UCUGUGUGUGCUGCUUUUG | 721 | 489 | CAAAAGCAGCACACACAGA | 930 |
| 489 | GACACAAAAACGGGGUUAC | 722 | 489 | GACACAAAAACGGGGUUAC | 722 | 507 | GUAACCCCGUUUUUGUGUC | 931 |
| 507 | CGUGUGGCAGUGAAGAAGC | 723 | 507 | CGUGUGGCAGUGAAGAAGC | 723 | 525 | GCUUCUUCACUGCCACACG | 932 |
| 525 | CUCUCCAGACCAUUUCAGU | 724 | 525 | CUCUCCAGACCAUUUCAGU | 724 | 543 | ACUGAAAUGGUCUGGAGAG | 933 |
| 543 | UCCAUCAUUCAUGCGAAAA | 725 | 543 | UCCAUCAUUCAUGCGAAAA | 725 | 561 | UUUUCGCAUGAAUGAUGGA | 934 |
| 561 | AGAACCUACAGAGAACUGC | 726 | 561 | AGAACCUACAGAGAACUGC | 726 | 579 | GCAGUUCUCUGUAGGUUCU | 935 |
| 579 | CGGUUACUUAAACAUAUGA | 727 | 579 | CGGUUACUUAAACAUAUGA | 727 | 597 | UCAUAUGUUUAAGUAACCG | 936 |
| 597 | AAACAUGAAAAUGUGAUUG | 728 | 597 | AAACAUGAAAAUGUGAUUG | 728 | 615 | CAAUCACAUUUUCAUGUUU | 937 |
| 615 | GGUCUGUUGGACGUUUUUA | 729 | 615 | GGUCUGUUGGACGUUUUUA | 729 | 633 | UAAAAACGUCCAACAGACC | 938 |
| 633 | ACACCUGCAAGGUCUCUGG | 730 | 633 | ACACCUGCAAGGUCUCUGG | 730 | 651 | CCAGAGACCUUGCAGGUGU | 939 |
| 651 | GAGGAAUUCAAUGAUGUGU | 731 | 651 | GAGGAAUUCAAUGAUGUGU | 731 | 669 | ACACAUCAUUGAAUUCCUC | 940 |
| 669 | UAUCUGGUGACCCAUCUCA | 732 | 669 | UAUCUGGUGACCCAUCUCA | 732 | 687 | UGAGAUGGGUCACCAGAUA | 941 |
| 687 | AUGGGGGCAGAUCUGAACA | 733 | 687 | AUGGGGGCAGAUCUGAACA | 733 | 705 | UGUUCAGAUCUGCCCCCAU | 942 |
| 705 | AACAUUGUGAAAUGUCAGA | 734 | 705 | AACAUUGUGAAAUGUCAGA | 734 | 723 | UCUGACAUUUCACAAUGUU | 943 |
| 723 | AAGCUUACAGAUGACCAUG | 735 | 723 | AAGCUUACAGAUGACCAUG | 735 | 741 | CAUGGUCAUCUGUAAGCUU | 944 |
| 741 | GUUCAGUUCCUUAUCUACC | 736 | 741 | GUUCAGUUCCUUAUCUACC | 736 | 759 | GGUAGAUAAGGAACUGAAC | 945 |
| 759 | CAAAUUCUCCGAGGUCUAA | 737 | 759 | CAAAUUCUCCGAGGUCUAA | 737 | 777 | UUAGACCUCGGAGAAUUUG | 946 |
| 777 | AAGUAUAUACAUUCAGCUG | 738 | 777 | AAGUAUAUACAUUCAGCUG | 738 | 795 | CAGCUGAAUGUAUAUACUU | 947 |
| 795 | GACAUAAUUCACAGGGACC | 739 | 795 | GACAUAAUUCACAGGGACC | 739 | 813 | GGUCCCUGUGAAUUAUGUC | 948 |
| 813 | CUAAAACCUAGUAAUCUAG | 740 | 813 | CUAAAACCUAGUAAUCUAG | 740 | 831 | CUAGAUUACUAGGUUUUAG | 949 |
| 831 | GCUGUGAAUGAAGACUGUG | 741 | 831 | GCUGUGAAUGAAGACUGUG | 741 | 849 | CACAGUCUUCAUUCACAGC | 950 |
| 849 | GAGCUGAAGAUUCUGGAUU | 742 | 849 | GAGCUGAAGAUUCUGGAUU | 742 | 867 | AAUCCAGAAUCUUCAGCUC | 951 |
| 867 | UUUGGACUGGCUCGGCACA | 743 | 867 | UUUGGACUGGCUCGGCACA | 743 | 885 | UGUGCCGAGCCAGUCCAAA | 952 |
| 885 | ACAGAUGAUGAAAUGACAG | 744 | 885 | ACAGAUGAUGAAAUGACAG | 744 | 903 | CUGUCAUUUCAUCAUCUGU | 953 |
| 903 | GGCUACGUGGCCACUAGGU | 745 | 903 | GGCUACGUGGCCACUAGGU | 745 | 921 | ACCUAGUGGCCACGUAGCC | 954 |
| 921 | UGGUACAGGGCUCCUGAGA | 746 | 921 | UGGUACAGGGCUCCUGAGA | 746 | 939 | UCUCAGGAGCCCUGUACCA | 955 |
| 939 | AUCAUGCUGAACUGGAUGC | 747 | 939 | AUCAUGCUGAACUGGAUGC | 747 | 957 | GCAUCCAGUUCAGCAUGAU | 956 |
| 957 | CAUUACAACCAGACAGUUG | 748 | 957 | CAUUACAACCAGACAGUUG | 748 | 975 | CAACUGUCUGGUUGUAAUG | 957 |
| 975 | GAUAUUUGGUCAGUGGGAU | 749 | 975 | GAUAUUUGGUCAGUGGGAU | 749 | 993 | AUCCCACUGACCAAAUAUC | 958 |
| 993 | UGCAUAAUGGCCGAGCUGU | 750 | 993 | UGCAUAAUGGCCGAGCUGU | 750 | 1011 | ACAGCUCGGCCAUUAUGCA | 959 |
| 1011 | UUGACUGGAAGAACAUUGU | 751 | 1011 | UUGACUGGAAGAACAUUGU | 751 | 1029 | ACAAUGUUCUUCCAGUCAA | 960 |
| 1029 | UUUCCUGGUACAGACCAUA | 752 | 1029 | UUUCCUGGUACAGACCAUA | 752 | 1047 | UAUGGUCUGUACCAGGAAA | 961 |
| 1047 | AUUGAUCAGUUGAAGCUCA | 753 | 1047 | AUUGAUCAGUUGAAGCUCA | 753 | 1065 | UGAGCUUCAACUGAUCAAU | 962 |
| 1065 | AUUUUAAGACUCGUUGGAA | 754 | 1065 | AUUUUAAGACUCGUUGGAA | 754 | 1083 | UUCCAACGAGUCUUAAAAU | 963 |
| 1083 | ACCCCAGGGGCUGAGCUUU | 755 | 1083 | ACCCCAGGGGCUGAGCUUU | 755 | 1101 | AAAGCUCAGCCCCUGGGGU | 964 |
| 1101 | UUGAAGAAAAUCUCCUCAG | 756 | 1101 | UUGAAGAAAAUCUCCUCAG | 756 | 1119 | CUGAGGAGAUUUUCUUCAA | 965 |
| 1119 | GAGUCUGCAAGAAACUAUA | 757 | 1119 | GAGUCUGCAAGAAACUAUA | 757 | 1137 | UAUAGUUUCUUGCAGACUC | 966 |
| 1137 | AUUCAGUCUUUGACUCAGA | 758 | 1137 | AUUCAGUCUUUGACUCAGA | 758 | 1155 | UCUGAGUCAAAGACUGAAU | 967 |
| 1155 | AUGCCGAAGAUGAACUUUG | 759 | 1155 | AUGCCGAAGAUGAACUUUG | 759 | 1173 | CAAAGUUCAUCUUCGGCAU | 968 |
| 1173 | GCGAAUGUAUUUAUUGGUG | 760 | 1173 | GCGAAUGUAUUUAUUGGUG | 760 | 1191 | CACCAAUAAAUACAUUCGC | 969 |
| 1191 | GCCAAUCCCCUGGCUGUCG | 761 | 1191 | GCCAAUCCCCUGGCUGUCG | 761 | 1209 | CGACAGCCAGGGGAUUGGC | 970 |
| 1209 | GACUUGCUGGAGAAGAUGC | 762 | 1209 | GACUUGCUGGAGAAGAUGC | 762 | 1227 | GCAUCUUCUCCAGCAAGUC | 971 |
| 1227 | CUUGUAUUGGACUCAGAUA | 763 | 1227 | CUUGUAUUGGACUCAGAUA | 763 | 1245 | UAUCUGAGUCCAAUACAAG | 972 |
| 1245 | AAGAGAAUUACAGCGGCCC | 764 | 1245 | AAGAGAAUUACAGCGGCCC | 764 | 1263 | GGGCCGCUGUAAUUCUCUU | 973 |
| 1263 | CAAGCCCUUGCACAUGCCU | 765 | 1263 | CAAGCCCUUGCACAUGCCU | 765 | 1281 | AGGCAUGUGCAAGGGCUUG | 974 |
| 1281 | UACUUUGCUCAGUACCACG | 766 | 1281 | UACUUUGCUCAGUACCACG | 766 | 1299 | CGUGGUACUGAGCAAAGUA | 975 |
| 1299 | GAUCCUGAUGAUGAACCAG | 767 | 1299 | GAUCCUGAUGAUGAACCAG | 767 | 1317 | CUGGUUCAUCAUCAGGAUC | 976 |
| 1317 | GUGGCCGAUCCUUAUGAUC | 768 | 1317 | GUGGCCGAUCCUUAUGAUC | 768 | 1335 | GAUCAUAAGGAUCGGCCAC | 977 |
| 1335 | CAGUCCUUUGAAAGCAGGG | 769 | 1335 | CAGUCCUUUGAAAGCAGGG | 769 | 1353 | CCCUGCUUUCAAAGGACUG | 978 |
| 1353 | GACCUCCUUAUAGAUGAGU | 770 | 1353 | GACCUCCUUAUAGAUGAGU | 770 | 1371 | ACUCAUCUAUAAGGAGGUC | 979 |
| 1371 | UGGAAAAGCCUGACCUAUG | 771 | 1371 | UGGAAAAGCCUGACCUAUG | 771 | 1389 | CAUAGGUCAGGCUUUUCCA | 980 |
| 1389 | GAUGAAGUCAUCAGCUUUG | 772 | 1389 | GAUGAAGUCAUCAGCUUUG | 772 | 1407 | CAAAGCUGAUGACUUCAUC | 981 |
| 1407 | GUGCCACCACCCCUUGACC | 773 | 1407 | GUGCCACCACCCCUUGACC | 773 | 1425 | GGUCAAGGGGUGGUGGCAC | 982 |
| 1425 | CAAGAAGAGAUGGAGUCCU | 774 | 1425 | CAAGAAGAGAUGGAGUCCU | 774 | 1443 | AGGACUCCAUCUCUUCUUG | 983 |
| 1443 | UGAGCACCUGGUUUCUGUU | 775 | 1443 | UGAGCACCUGGUUUCUGUU | 775 | 1461 | AACAGAAACCAGGUGCUCA | 984 |
| 1461 | UCUGUUGAUCCCACUUCAC | 776 | 1461 | UCUGUUGAUCCCACUUCAC | 776 | 1479 | GUGAAGUGGGAUCAACAGA | 985 |
| 1479 | CUGUGAGGGGAAGGCCUUU | 777 | 1479 | CUGUGAGGGGAAGGCCUUU | 777 | 1497 | AAAGGCCUUCCCCUCACAG | 986 |
| 1497 | UUCACGGGAACUCUCCAAA | 778 | 1497 | UUCACGGGAACUCUCCAAA | 778 | 1515 | UUUGGAGAGUUCCCGUGAA | 987 |
| 1515 | AUAUUAUUCAAGUGCCUCU | 779 | 1515 | AUAUUAUUCAAGUGCCUCU | 779 | 1533 | AGAGGCACUUGAAUAAUAU | 988 |
| 1533 | UUGUUGCAGAGAUUUCCUC | 780 | 1533 | UUGUUGCAGAGAUUUCCUC | 780 | 1551 | GAGGAAAUCUCUGCAACAA | 989 |
| 1551 | CCAUGGUGGAAGGGGGUGU | 781 | 1551 | CCAUGGUGGAAGGGGGUGU | 781 | 1569 | ACACCCCCUUCCACCAUGG | 990 |
| 1569 | UGCGUGCGUGUGCGUGCGU | 782 | 1569 | UGCGUGCGUGUGCGUGCGU | 782 | 1587 | ACGCACGCACACGCACGCA | 991 |
| 1587 | UGUUAGUGUGUGUGCAUGU | 783 | 1587 | UGUUAGUGUGUGUGCAUGU | 783 | 1605 | ACAUGCACACACACUAACA | 992 |
| 1605 | UGUGUGUCUGUCUUUGUGG | 784 | 1605 | UGUGUGUCUGUCUUUGUGG | 784 | 1623 | CCACAAAGACAGACACACA | 993 |
| 1623 | GGAGGGUAAGACAAUAUGA | 785 | 1623 | GGAGGGUAAGACAAUAUGA | 785 | 1641 | UCAUAUUGUCUUACCCUCC | 994 |
| 1641 | AACAAACUAUGAUCACAGU | 786 | 1641 | AACAAACUAUGAUCACAGU | 786 | 1659 | ACUGUGAUCAUAGUUUGUU | 995 |
| 1659 | UGACUUUACAGGAGGUUGU | 787 | 1659 | UGACUUUACAGGAGGUUGU | 787 | 1677 | ACAACCUCCUGUAAAGUCA | 996 |
| 1677 | UGGAUGCUCCAGGGCAGCC | 788 | 1677 | UGGAUGCUCCAGGGCAGCC | 788 | 1695 | GGCUGCCCUGGAGCAUCCA | 997 |
| 1695 | CUCCACCUUGCUCUUCUUU | 789 | 1695 | CUCCACCUUGCUCUUCUUU | 789 | 1713 | AAAGAAGAGCAAGGUGGAG | 998 |
| 1713 | UCUGAGAGUUGGCUCAGGC | 790 | 1713 | UCUGAGAGUUGGCUCAGGC | 790 | 1731 | GCCUGAGCCAACUCUCAGA | 999 |
| 1731 | CAGACAAGAGCUGCUGUCC | 791 | 1731 | CAGACAAGAGCUGCUGUCC | 791 | 1749 | GGACAGCAGCUCUUGUCUG | 1000 |
| 1749 | CUUUUAGGAAUAUGUUCAA | 792 | 1749 | CUUUUAGGAAUAUGUUCAA | 792 | 1767 | UUGAACAUAUUCCUAAAAG | 1001 |
| 1767 | AUGCAAAGUAAAAAAAUAU | 793 | 1767 | AUGCAAAGUAAAAAAAUAU | 793 | 1785 | AUAUUUUUUUACUUUGCAU | 1002 |
| 1785 | UGAAUUGUCCCCAAUCCCG | 794 | 1785 | UGAAUUGUCCCCAAUCCCG | 794 | 1803 | CGGGAUUGGGGACAAUUCA | 1003 |
| 1803 | GGUCAUGCUUUUGCCACUU | 795 | 1803 | GGUCAUGCUUUUGCCACUU | 795 | 1821 | AAGUGGCAAAAGCAUGACC | 1004 |
| 1821 | UUGGCUUCUCCUGUGACCC | 796 | 1821 | UUGGCUUCUCCUGUGACCC | 796 | 1839 | GGGUCACAGGAGAAGCCAA | 1005 |
| 1839 | CCACCUUGACGGUGGGGCG | 797 | 1839 | CCACCUUGACGGUGGGGCG | 797 | 1857 | CGCCCCACCGUCAAGGUGG | 1006 |
| 1857 | GUAGACUUGACAACAUCCC | 798 | 1857 | GUAGACUUGACAACAUCCC | 798 | 1875 | GGGAUGUUGUCAAGUCUAC | 1007 |
| 1875 | CACAGUGGCACGGAGAGAA | 799 | 1875 | CACAGUGGCACGGAGAGAA | 799 | 1893 | UUCUCUCCGUGCCACUGUG | 1008 |
| 1893 | AGGCCCAUACCUUCUGGUU | 800 | 1893 | AGGCCCAUACCUUCUGGUU | 800 | 1911 | AACCAGAAGGUAUGGGCCU | 1009 |
| 1911 | UGCUUCAGACCUGACACCG | 801 | 1911 | UGCUUCAGACCUGACACCG | 801 | 1929 | CGGUGUCAGGUCUGAAGCA | 1010 |
| 1929 | GUCCCUCAGUGAUACGUAC | 802 | 1929 | GUCCCUCAGUGAUACGUAC | 802 | 1947 | GUACGUAUCACUGAGGGAC | 1011 |
| 1947 | CAGCCAAAAAGGACCAACU | 803 | 1947 | CAGCCAAAAAGGACCAACU | 803 | 1965 | AGUUGGUCCUUUUUGGCUG | 1012 |
| 1965 | UGGCUUCUGUGCACUAGCC | 804 | 1965 | UGGCUUCUGUGCACUAGCC | 804 | 1983 | GGCUAGUGCACAGAAGCCA | 1013 |
| 1983 | CUGUGAUUAACUUGCUUAG | 805 | 1983 | CUGUGAUUAACUUGCUUAG | 805 | 2001 | CUAAGCAAGUUAAUCACAG | 1014 |
| 2001 | GUAUGGUUCUCAGAUCUUG | 806 | 2001 | GUAUGGUUCUCAGAUCUUG | 806 | 2019 | CAAGAUCUGAGAACCAUAC | 1015 |
| 2019 | GACAGUAUAUUUGAAACUG | 807 | 2019 | GACAGUAUAUUUGAAACUG | 807 | 2037 | CAGUUUCAAAUAUACUGUC | 1016 |
| 2037 | GUAAAUAUGUUUGUGCCUU | 808 | 2037 | GUAAAUAUGUUUGUGCCUU | 808 | 2055 | AAGGCACAAACAUAUUUAC | 1017 |
| 2055 | UAAAAGGAGAGAAGAAAGU | 809 | 2055 | UAAAAGGAGAGAAGAAAGU | 809 | 2073 | ACUUUCUUCUCUCCUUUUA | 1018 |
| 2073 | UGUAGAUAGUUAAAAGACU | 810 | 2073 | UGUAGAUAGUUAAAAGACU | 810 | 2091 | AGUCUUUUAACUAUCUACA | 1019 |
| 2091 | UGCAGCUGCUGAAGUUCUG | 811 | 2091 | UGCAGCUGCUGAAGUUCUG | 811 | 2109 | CAGAACUUCAGCAGCUGCA | 1020 |
| 2109 | GAGCCGGGCAAGUCGAGAG | 812 | 2109 | GAGCCGGGCAAGUCGAGAG | 812 | 2127 | CUCUCGACUUGCCCGGCUC | 1021 |
| 2127 | GGGCUGUUGGACAGCUGCU | 813 | 2127 | GGGCUGUUGGACAGCUGCU | 813 | 2145 | AGCAGCUGUCCAACAGCCC | 1022 |
| 2145 | UUGUGGGCCCGGAGUAAUC | 814 | 2145 | UUGUGGGCCCGGAGUAAUC | 814 | 2163 | GAUUACUCCGGGCCCACAA | 1023 |
| 2163 | CAGGCAGCCUUCAUAGGCG | 815 | 2163 | CAGGCAGCCUUCAUAGGCG | 815 | 2181 | CGCCUAUGAAGGCUGCCUG | 1024 |
| 2181 | GGUCAUGUGUGCAUGUGAG | 816 | 2181 | GGUCAUGUGUGCAUGUGAG | 816 | 2199 | CUCACAUGCACACAUGACC | 1025 |
| 2199 | GCACAUGCGUAUAUGUGCG | 817 | 2199 | GCACAUGCGUAUAUGUGCG | 817 | 2217 | CGCACAUAUACGCAUGUGC | 1026 |
| 2217 | GUCUCUCUUUCUCCCUCAC | 818 | 2217 | GUCUCUCUUUCUCCCUCAC | 818 | 2235 | GUGAGGGAGAAAGAGAGAC | 1027 |
| 2235 | CCCCCAGGUGUUGCCAUUU | 819 | 2235 | CCCCCAGGUGUUGCCAUUU | 819 | 2253 | AAAUGGCAACACCUGGGGG | 1028 |
| 2253 | UCUCUGCUUACCCUUCACC | 820 | 2253 | UCUCUGCUUACCCUUCACC | 820 | 2271 | GGUGAAGGGUAAGCAGAGA | 1029 |
| 2271 | CUUUGGUGCAGAGGUUUCU | 821 | 2271 | CUUUGGUGCAGAGGUUUCU | 821 | 2289 | AGAAACCUCUGCACCAAAG | 1030 |
| 2289 | UUGAAUAUCUGCCCCAGUA | 822 | 2289 | UUGAAUAUCUGCCCCAGUA | 822 | 2307 | UACUGGGGCAGAUAUUCAA | 1031 |
| 2307 | AGUCAGAAGCAGGUUCUUG | 823 | 2307 | AGUCAGAAGCAGGUUCUUG | 823 | 2325 | CAAGAACCUGCUUCUGACU | 1032 |
| 2325 | GAUGUCAUGUACUUCCUGU | 824 | 2325 | GAUGUCAUGUACUUCCUGU | 824 | 2343 | ACAGGAAGUACAUGACAUC | 1033 |
| 2343 | UGUACUCUUUAUUUCUAGC | 825 | 2343 | UGUACUCUUUAUUUCUAGC | 825 | 2361 | GCUAGAAAUAAAGAGUACA | 1034 |
| 2361 | CAGAGUGAGGAUGUGUUUU | 826 | 2361 | CAGAGUGAGGAUGUGUUUU | 826 | 2379 | AAAACACAUCCUCACUCUG | 1035 |
| 2379 | UGCACGUCUUGCUAUUUGA | 827 | 2379 | UGCACGUCUUGCUAUUUGA | 827 | 2397 | UCAAAUAGCAAGACGUGCA | 1036 |
| 2397 | AGCAUGCACAGCUGCUUGU | 828 | 2397 | AGCAUGCACAGCUGCUUGU | 828 | 2415 | ACAAGCAGCUGUGCAUGCU | 1037 |
| 2415 | UCCUGCUCUCUUCAGGAGG | 829 | 2415 | UCCUGCUCUCUUCAGGAGG | 829 | 2433 | CCUCCUGAAGAGAGCAGGA | 1038 |
| 2433 | GCCCUGGUGUCAGGCAGGU | 830 | 2433 | GCCCUGGUGUCAGGCAGGU | 830 | 2451 | ACCUGCCUGACACCAGGGC | 1039 |
| 2451 | UUUGCCAGUGAAGACUUCU | 831 | 2451 | UUUGCCAGUGAAGACUUCU | 831 | 2469 | AGAAGUCUUCACUGGCAAA | 1040 |
| 2469 | UUGGGUAGUUUAGAUCCCA | 832 | 2469 | UUGGGUAGUUUAGAUCCCA | 832 | 2487 | UGGGAUCUAAACUACCCAA | 1041 |
| 2487 | AUGUCACCUCAGCUGAUAU | 833 | 2487 | AUGUCACCUCAGCUGAUAU | 833 | 2505 | AUAUCAGCUGAGGUGACAU | 1042 |
| 2505 | UUAUGGCAAGUGAUAUCAC | 834 | 2505 | UUAUGGCAAGUGAUAUCAC | 834 | 2523 | GUGAUAUCACUUGCCAUAA | 1043 |
| 2523 | CCUCUCUUCAGCCCCUAGU | 835 | 2523 | CCUCUCUUCAGCCCCUAGU | 835 | 2541 | ACUAGGGGCUGAAGAGAGG | 1044 |
| 2541 | UGCUAUUCUGUGUUGAACA | 836 | 2541 | UGCUAUUCUGUGUUGAACA | 836 | 2559 | UGUUCAACACAGAAUAGCA | 1045 |
| 2559 | ACAAUUGAUACUUCAGGUG | 837 | 2559 | ACAAUUGAUACUUCAGGUG | 837 | 2577 | CACCUGAAGUAUCAAUUGU | 1046 |
| 2577 | GCUUUUGAUGUGAAAAUCA | 838 | 2577 | GCUUUUGAUGUGAAAAUCA | 838 | 2595 | UGAUUUUCACAUCAAAAGC | 1047 |
| 2595 | AUGAAAAGAGGAACAGGUG | 839 | 2595 | AUGAAAAGAGGAACAGGUG | 839 | 2613 | CACCUGUUCCUCUUUUCAU | 1048 |
| 2613 | GGAUGUAUAGCAUUUUUAU | 840 | 2613 | GGAUGUAUAGCAUUUUUAU | 840 | 2631 | AUAAAAAUGCUAUACAUCC | 1049 |
| 2631 | UUCAUGCCAUCUGUUUUCA | 841 | 2631 | UUCAUGCCAUCUGUUUUCA | 841 | 2649 | UGAAAACAGAUGGCAUGAA | 1050 |
| 2649 | AACCAACUAUUUUUGAGGA | 842 | 2649 | AACCAACUAUUUUUGAGGA | 842 | 2667 | UCCUCAAAAAUAGUUGGUU | 1051 |
| 2667 | AAUUAUCAUGGGAAAAGAC | 843 | 2667 | AAUUAUCAUGGGAAAAGAC | 843 | 2685 | GUCUUUUCCCAUGAUAAUU | 1052 |
| 2685 | CCAGGGCUUUUCCCAGGAA | 844 | 2685 | CCAGGGCUUUUCCCAGGAA | 844 | 2703 | UUCCUGGGAAAAGCCCUGG | 1053 |
| 2703 | AUAUCCCAAACUUCGGAAA | 845 | 2703 | AUAUCCCAAACUUCGGAAA | 845 | 2721 | UUUCCGAAGUUUGGGAUAU | 1054 |
| 2721 | ACAAGUUAUUCUCUUCACU | 846 | 2721 | ACAAGUUAUUCUCUUCACU | 846 | 2739 | AGUGAAGAGAAUAACUUGU | 1055 |
| 2739 | UCCCAAUAACUAAUGCUAA | 847 | 2739 | UCCCAAUAACUAAUGCUAA | 847 | 2757 | UUAGCAUUAGUUAUUGGGA | 1056 |
| 2757 | AGAAAUGCUGAAAAUCAAA | 848 | 2757 | AGAAAUGCUGAAAAUCAAA | 848 | 2775 | UUUGAUUUUCAGCAUUUCU | 1057 |
| 2775 | AGUAAAAAAUUAAAGCCCA | 849 | 2775 | AGUAAAAAAUUAAAGCCCA | 849 | 2793 | UGGGCUUUAAUUUUUUACU | 1058 |
| 2793 | AUAAGGCCAGAAACUCCUU | 850 | 2793 | AUAAGGCCAGAAACUCCUU | 850 | 2811 | AAGGAGUUUCUGGCCUUAU | 1059 |
| 2811 | UUUGCUGUCUUUCUCUAAA | 851 | 2811 | UUUGCUGUCUUUCUCUAAA | 851 | 2829 | UUUAGAGAAAGACAGCAAA | 1060 |
| 2829 | AUAUGAUUACUUUAAAAUA | 852 | 2829 | AUAUGAUUACUUUAAAAUA | 852 | 2847 | UAUUUUAAAGUAAUCAUAU | 1061 |
| 2847 | AAAAAAGUAACAAGGUGUC | 853 | 2847 | AAAAAAGUAACAAGGUGUC | 853 | 2865 | GACACCUUGUUACUUUUUU | 1062 |
| 2865 | CUUUUCCACUCCUAUGGAA | 854 | 2865 | CUUUUCCACUCCUAUGGAA | 854 | 2883 | UUCCAUAGGAGUGGAAAAG | 1063 |
| 2883 | AAAGGGUCUUCUUGGCAGC | 855 | 2883 | AAAGGGUCUUCUUGGCAGC | 855 | 2901 | GCUGCCAAGAAGACCCUUU | 1064 |
| 2901 | CUUAACAUUGACUUCUUGG | 856 | 2901 | CUUAACAUUGACUUCUUGG | 856 | 2919 | CCAAGAAGUCAAUGUUAAG | 1065 |
| 2919 | GUUUGGGGAGAAAUAAAUU | 857 | 2919 | GUUUGGGGAGAAAUAAAUU | 857 | 2937 | AAUUUAUUUCUCCCCAAAC | 1066 |
| 2937 | UUUGUUUCAGAAUUUUGUA | 858 | 2937 | UUUGUUUCAGAAUUUUGUA | 858 | 2955 | UACAAAAUUCUGAAACAAA | 1067 |
| 2955 | AUAUUGUAGGAAUCCCUUU | 859 | 2955 | AUAUUGUAGGAAUCCCUUU | 859 | 2973 | AAAGGGAUUCCUACAAUAU | 1068 |
| 2973 | UGAGAAUGUGAUUCCUUUU | 860 | 2973 | UGAGAAUGUGAUUCCUUUU | 860 | 2991 | AAAAGGAAUCACAUUCUCA | 1069 |
| 2991 | UGAUGGGGAGAAAGGGCAA | 861 | 2991 | UGAUGGGGAGAAAGGGCAA | 861 | 3009 | UUGCCCUUUCUCCCCAUCA | 1070 |
| 3009 | AAUUAUUUUAAUAUUUUGU | 862 | 3009 | AAUUAUUUUAAUAUUUUGU | 862 | 3027 | ACAAAAUAUUAAAAUAAUU | 1071 |
| 3027 | UAUUUUCAACUUUAUAAAG | 863 | 3027 | UAUUUUCAACUUUAUAAAG | 863 | 3045 | CUUUAUAAAGUUGAAAAUA | 1072 |
| 3045 | GAUAAAAUAUCCUCAGGGG | 864 | 3045 | GAUAAAAUAUCCUCAGGGG | 864 | 3063 | CCCCUGAGGAUAUUUUAUC | 1073 |
| 3063 | GUGGAGAAGUGUCGUUUUC | 865 | 3063 | GUGGAGAAGUGUCGUUUUC | 865 | 3081 | GAAAACGACACUUCUCCAC | 1074 |
| 3081 | CAUAACUUGCUGAAUUUCA | 866 | 3081 | CAUAACUUGCUGAAUUUCA | 866 | 3099 | UGAAAUUCAGCAAGUUAUG | 1075 |
| 3099 | AGGCAUUUUGUUCUACAUG | 867 | 3099 | AGGCAUUUUGUUCUACAUG | 867 | 3117 | CAUGUAGAACAAAAUGCCU | 1076 |
| 3117 | GAGGACUCAUAUAUUUAAG | 868 | 3117 | GAGGACUCAUAUAUUUAAG | 868 | 3135 | CUUAAAUAUAUGAGUCCUC | 1077 |
| 3135 | GCCUUUUGUGUAAUAAGAA | 869 | 3135 | GCCUUUUGUGUAAUAAGAA | 869 | 3153 | UUCUUAUUACACAAAAGGC | 1078 |
| 3153 | AAGUAUAAAGUCACUUCCA | 870 | 3153 | AAGUAUAAAGUCACUUCCA | 870 | 3171 | UGGAAGUGACUUUAUACUU | 1079 |
| 3171 | AGUGUUGGCUGUGUGACAG | 871 | 3171 | AGUGUUGGCUGUGUGACAG | 871 | 3189 | CUGUCACACAGCCAACACU | 1080 |
| 3189 | GAAUCUUGUAUUUGGGCCA | 872 | 3189 | GAAUCUUGUAUUUGGGCCA | 872 | 3207 | UGGCCCAAAUACAAGAUUC | 1081 |
| 3207 | AAGGUGUUUCCAUUUCUCA | 873 | 3207 | AAGGUGUUUCCAUUUCUCA | 873 | 3225 | UGAGAAAUGGAAACACCUU | 1082 |
| 3225 | AAUCAGUGCAGUGAUACAU | 874 | 3225 | AAUCAGUGCAGUGAUACAU | 874 | 3243 | AUGUAUCACUGCACUGAUU | 1083 |
| 3243 | UGUACUCCAGAGGGACAGG | 875 | 3243 | UGUACUCCAGAGGGACAGG | 875 | 3261 | CCUGUCCCUCUGGAGUACA | 1084 |
| 3261 | GGUGGACCCCCUGAGUCAA | 876 | 3261 | GGUGGACCCCCUGAGUCAA | 876 | 3279 | UUGACUCAGGGGGUCCACC | 1085 |
| 3279 | ACUGGAGCAAGAAGGAAGG | 877 | 3279 | ACUGGAGCAAGAAGGAAGG | 877 | 3297 | CCUUCCUUCUUGCUCCAGU | 1086 |
| 3297 | GAGGCAGACUGAUGGCGAU | 878 | 3297 | GAGGCAGACUGAUGGCGAU | 878 | 3315 | AUCGCCAUCAGUCUGCCUC | 1087 |
| 3315 | UUCCCUCUCACCCGGGACU | 879 | 3315 | UUCCCUCUCACCCGGGACU | 879 | 3333 | AGUCCCGGGUGAGAGGGAA | 1088 |
| 3333 | UCUCCCCCUUUCAAGGAAA | 880 | 3333 | UCUCCCCCUUUCAAGGAAA | 880 | 3351 | UUUCCUUGAAAGGGGGAGA | 1089 |
| 3351 | AGUGAACCUUUAAAGUAAA | 881 | 3351 | AGUGAACCUUUAAAGUAAA | 881 | 3369 | UUUACUUUAAAGGUUCACU | 1090 |
| 3369 | AGGCCUCAUCUCCUUUAUU | 882 | 3369 | AGGCCUCAUCUCCUUUAUU | 882 | 3387 | AAUAAAGGAGAUGAGGCCU | 1091 |
| 3387 | UGCAGUUCAAAUCCUCACC | 883 | 3387 | UGCAGUUCAAAUCCUCACC | 883 | 3405 | GGUGAGGAUUUGAACUGCA | 1092 |
| 3405 | CAUCCACAGCAAGAUGAAU | 884 | 3405 | CAUCCACAGCAAGAUGAAU | 884 | 3423 | AUUCAUCUUGCUGUGGAUG | 1093 |
| 3423 | UUUUAUCAGCCAUGUUUGG | 885 | 3423 | UUUUAUCAGCCAUGUUUGG | 885 | 3441 | CCAAACAUGGCUGAUAAAA | 1094 |
| 3441 | GUUGUAAAUGCUCGUGUGA | 886 | 3441 | GUUGUAAAUGCUCGUGUGA | 886 | 3459 | UCACACGAGCAUUUACAAC | 1095 |
| 3459 | AUUUCCUACAGAAAUACUG | 887 | 3459 | AUUUCCUACAGAAAUACUG | 887 | 3477 | CAGUAUUUCUGUAGGAAAU | 1096 |
| 3477 | GCUCUGAAUAUUUUGUAAU | 888 | 3477 | GCUCUGAAUAUUUUGUAAU | 888 | 3495 | AUUACAAAAUAUUCAGAGC | 1097 |
| 3495 | UAAAGGUCUUUGCACAUGU | 889 | 3495 | UAAAGGUCUUUGCACAUGU | 889 | 3513 | ACAUGUGCAAAGACCUUUA | 1098 |
| 3513 | UGACCACAUACGUGUUAGG | 890 | 3513 | UGACCACAUACGUGUUAGG | 890 | 3531 | CCUAACACGUAUGUGGUCA | 1099 |
| 3531 | GAGGCUGCAUGCUCUGGAA | 891 | 3531 | GAGGCUGCAUGCUCUGGAA | 891 | 3549 | UUCCAGAGCAUGCAGCCUC | 1100 |
| 3549 | AGCCUGGACUCUAAGCUGG | 892 | 3549 | AGCCUGGACUCUAAGCUGG | 892 | 3567 | CCAGCUUAGAGUCCAGGCU | 1101 |
| 3567 | GAGCUCUUGGAAGAGCUCU | 893 | 3567 | GAGCUCUUGGAAGAGCUCU | 893 | 3585 | AGAGCUCUUCCAAGAGCUC | 1102 |
| 3585 | UUCGGUUUCUGAGCAUAAU | 894 | 3585 | UUCGGUUUCUGAGCAUAAU | 894 | 3603 | AUUAUGCUCAGAAACCGAA | 1103 |
| 3603 | UGCUCCCAUCUCCUGAUUU | 895 | 3603 | UGCUCCCAUCUCCUGAUUU | 895 | 3621 | AAAUCAGGAGAUGGGAGCA | 1104 |
| 3621 | UCUCUGAACAGAAAACAAA | 896 | 3621 | UCUCUGAACAGAAAACAAA | 896 | 3639 | UUUGUUUUCUGUUCAGAGA | 1105 |
| 3639 | AAGAGAGAAUGAGGGAAAU | 897 | 3639 | AAGAGAGAAUGAGGGAAAU | 897 | 3657 | AUUUCCCUCAUUCUCUCUU | 1106 |
| 3657 | UUGCUAUUUUAUUUGUAUU | 898 | 3657 | UUGCUAUUUUAUUUGUAUU | 898 | 3675 | AAUACAAAUAAAAUAGCAA | 1107 |
| 3675 | UCAUGAACUUGGCUGUAAU | 899 | 3675 | UCAUGAACUUGGCUGUAAU | 899 | 3693 | AUUACAGCCAAGUUCAUGA | 1108 |
| 3693 | UCAGUUAUGCCGUAUAGGA | 900 | 3693 | UCAGUUAUGCCGUAUAGGA | 900 | 3711 | UCCUAUACGGCAUAACUGA | 1109 |
| 3711 | AUGUCAGACAAUACCACUG | 901 | 3711 | AUGUCAGACAAUACCACUG | 901 | 3729 | CAGUGGUAUUGUCUGACAU | 1110 |
| 3729 | GGUUAAAAUAAAGCCUAUU | 902 | 3729 | GGUUAAAAUAAAGCCUAUU | 902 | 3747 | AAUAGGCUUUAUUUUAACC | 1111 |
| 3737 | UAAAGCCUAUUUUUCAAAU | 903 | 3737 | UAAAGCCUAUUUUUCAAAU | 903 | 3755 | AUUUGAAAAAUAGGCUUUA | 1112 |

| | | | | | | | | |
|---|---|---|---|---|---|---|---|---|
| | | Seq | | | Seq | | | Seq |
| Pos | Seq | ID | UPos | Upper seq | ID | LPos | Lower seq | ID |

hJUN NM_002228

| | | | | | | | | |
|---|---|---|---|---|---|---|---|---|
| 3 | AGUUGCACUGAGUGUGGCU | 1247 | 3 | AGUUGCACUGAGUGUGGCU | 1247 | 21 | AGCCACACUCAGUGCAACU | 1428 |
| 21 | UGAAGCAGCGAGGCGGGAG | 1248 | 21 | UGAAGCAGCGAGGCGGGAG | 1248 | 39 | CUCCCGCCUCGCUGCUUCA | 1429 |
| 39 | GUGGAGGUGCGCGGAGUCA | 1249 | 39 | GUGGAGGUGCGCGGAGUCA | 1249 | 57 | UGACUCCGCGCACCUCCAC | 1430 |
| 57 | AGGCAGACAGACAGACACA | 1250 | 57 | AGGCAGACAGACAGACACA | 1250 | 75 | UGUGUCUGUCUGUCUGCCU | 1431 |
| 75 | AGCCAGCCAGCCAGGUCGG | 1251 | 75 | AGCCAGCCAGCCAGGUCGG | 1251 | 93 | CCGACCUGGCUGGCUGGCU | 1432 |
| 93 | GCAGUAUAGUCCGAACUGC | 1252 | 93 | GCAGUAUAGUCCGAACUGC | 1252 | 111 | GCAGUUCGGACUAUACUGC | 1433 |
| 111 | CAAAUCUUAUUUUCUUUUC | 1253 | 111 | CAAAUCUUAUUUUCUUUUC | 1253 | 129 | GAAAAGAAAAUAAGAUUUG | 1434 |
| 129 | CACCUUCUCUCUAACUGCC | 1254 | 129 | CACCUUCUCUCUAACUGCC | 1254 | 147 | GGCAGUUAGAGAGAAGGUG | 1435 |
| 147 | CCAGAGCUAGCGCCUGUGG | 1255 | 147 | CCAGAGCUAGCGCCUGUGG | 1255 | 165 | CCACAGGCGCUAGCUCUGG | 1436 |
| 165 | GCUCCCGGGCUGGUGGUUC | 1256 | 165 | GCUCCCGGGCUGGUGGUUC | 1256 | 183 | GAACCACCAGCCCGGGAGC | 1437 |
| 183 | CGGGAGUGUCCAGAGAGCC | 1257 | 183 | CGGGAGUGUCCAGAGAGCC | 1257 | 201 | GGCUCUCUGGACACUCCCG | 1438 |
| 201 | CUUGUCUCCAGCCGGCCCC | 1258 | 201 | CUUGUCUCCAGCCGGCCCC | 1258 | 219 | GGGGCCGGCUGGAGACAAG | 1439 |
| 219 | CGGGAGGAGAGCCCUGCUG | 1259 | 219 | CGGGAGGAGAGCCCUGCUG | 1259 | 237 | CAGCAGGGCUCUCCUCCCG | 1440 |
| 237 | GCCCAGGCGCUGUUGACAG | 1260 | 237 | GCCCAGGCGCUGUUGACAG | 1260 | 255 | CUGUCAACAGCGCCUGGGC | 1441 |
| 255 | GCGGCGGAAAGCAGCGGUA | 1261 | 255 | GCGGCGGAAAGCAGCGGUA | 1261 | 273 | UACCGCUGCUUUCCGCCGC | 1442 |
| 273 | ACCCCACGCGCCCGCCGGG | 1262 | 273 | ACCCCACGCGCCCGCCGGG | 1262 | 291 | CCCGGCGGGCGCGUGGGGU | 1443 |
| 291 | GGGACGUCGGCGAGCGGCU | 1263 | 291 | GGGACGUCGGCGAGCGGCU | 1263 | 309 | AGCCGCUCGCCGACGUCCC | 1444 |
| 309 | UGCAGCAGCAAAGAACUUU | 1264 | 309 | UGCAGCAGCAAAGAACUUU | 1264 | 327 | AAAGUUCUUUGCUGCUGCA | 1445 |
| 327 | UCCCGGCGGGGAGGACCGG | 1265 | 327 | UCCCGGCGGGGAGGACCGG | 1265 | 345 | CCGGUCCUCCCCGCCGGGA | 1446 |
| 345 | GAGACAAGUGGCAGAGUCC | 1266 | 345 | GAGACAAGUGGCAGAGUCC | 1266 | 363 | GGACUCUGCCACUUGUCUC | 1447 |
| 363 | CCGGAGCGAACUUUUGCAA | 1267 | 363 | CCGGAGCGAACUUUUGCAA | 1267 | 381 | UUGCAAAAGUUCGCUCCGG | 1448 |
| 381 | AGCCUUUCCUGCGUCUUAG | 1268 | 381 | AGCCUUUCCUGCGUCUUAG | 1268 | 399 | CUAAGACGCAGGAAAGGCU | 1449 |
| 399 | GGCUUCUCCACGGCGGUAA | 1269 | 399 | GGCUUCUCCACGGCGGUAA | 1269 | 417 | UUACCGCCGUGGAGAAGCC | 1450 |
| 417 | AAGACCAGAAGGCGGCGGA | 1270 | 417 | AAGACCAGAAGGCGGCGGA | 1270 | 435 | UCCGCCGCCUUCUGGUCUU | 1451 |
| 435 | AGAGCCACGCAAGAGAAGA | 1271 | 435 | AGAGCCACGCAAGAGAAGA | 1271 | 453 | UCUUCUCUUGCGUGGCUCU | 1452 |
| 453 | AAGGACGUGCGCUCAGCUU | 1272 | 453 | AAGGACGUGCGCUCAGCUU | 1272 | 471 | AAGCUGAGCGCACGUCCUU | 1453 |
| 471 | UCGCUCGCACCGGUUGUUG | 1273 | 471 | UCGCUCGCACCGGUUGUUG | 1273 | 489 | CAACAACCGGUGCGAGCGA | 1454 |
| 489 | GAACUUGGGCGAGCGCGAG | 1274 | 489 | GAACUUGGGCGAGCGCGAG | 1274 | 507 | CUCGCGCUCGCCCAAGUUC | 1455 |
| 507 | GCCGCGGCUGCCGGGCGCC | 1275 | 507 | GCCGCGGCUGCCGGGCGCC | 1275 | 525 | GGCGCCCGGCAGCCGCGGC | 1456 |
| 525 | CCCCUCCCCCUAGCAGCGG | 1276 | 525 | CCCCUCCCCCUAGCAGCGG | 1276 | 543 | CCGCUGCUAGGGGGAGGGG | 1457 |
| 543 | GAGGAGGGGACAAGUCGUC | 1277 | 543 | GAGGAGGGGACAAGUCGUC | 1277 | 561 | GACGACUUGUCCCCUCCUC | 1458 |
| 561 | CGGAGUCCGGGCGGCCAAG | 1278 | 561 | CGGAGUCCGGGCGGCCAAG | 1278 | 579 | CUUGGCCGCCCGGACUCCG | 1459 |
| 579 | GACCCGCCGCCGGCCGGCC | 1279 | 579 | GACCCGCCGCCGGCCGGCC | 1279 | 597 | GGCCGGCCGGCGGCGGGUC | 1460 |
| 597 | CACUGCAGGGUCCGCACUG | 1280 | 597 | CACUGCAGGGUCCGCACUG | 1280 | 615 | CAGUGCGGACCCUGCAGUG | 1461 |
| 615 | GAUCCGCUCCGCGGGGAGA | 1281 | 615 | GAUCCGCUCCGCGGGGAGA | 1281 | 633 | UCUCCCCGCGGAGCGGAUC | 1462 |
| 633 | AGCCGCUGCUCUGGGAAGU | 1282 | 633 | AGCCGCUGCUCUGGGAAGU | 1282 | 651 | ACUUCCCAGAGCAGCGGCU | 1463 |
| 651 | UGAGUUCGCCUGCGGACUC | 1283 | 651 | UGAGUUCGCCUGCGGACUC | 1283 | 669 | GAGUCCGCAGGCGAACUCA | 1464 |
| 669 | CCGAGGAACCGCUGCGCCC | 1284 | 669 | CCGAGGAACCGCUGCGCCC | 1284 | 687 | GGGCGCAGCGGUUCCUCGG | 1465 |
| 687 | CGAAGAGCGCUCAGUGAGU | 1285 | 687 | CGAAGAGCGCUCAGUGAGU | 1285 | 705 | ACUCACUGAGCGCUCUUCG | 1466 |
| 705 | UGACCGCGACUUUUCAAAG | 1286 | 705 | UGACCGCGACUUUUCAAAG | 1286 | 723 | CUUUGAAAAGUCGCGGUCA | 1467 |
| 723 | GCCGGGUAGCGCGCGCGAG | 1287 | 723 | GCCGGGUAGCGCGCGCGAG | 1287 | 741 | CUCGCGCGCGCUACCCGGC | 1468 |
| 741 | GUCGACAAGUAAGAGUGCG | 1288 | 741 | GUCGACAAGUAAGAGUGCG | 1288 | 759 | CGCACUCUUACUUGUCGAC | 1469 |
| 759 | GGGAGGCAUCUUAAUUAAC | 1289 | 759 | GGGAGGCAUCUUAAUUAAC | 1289 | 777 | GUUAAUUAAGAUGCCUCCC | 1470 |
| 777 | CCCUGCGCUCCCUGGAGCG | 1290 | 777 | CCCUGCGCUCCCUGGAGCG | 1290 | 795 | CGCUCCAGGGAGCGCAGGG | 1471 |
| 795 | GAGCUGGUGAGGAGGGCGC | 1291 | 795 | GAGCUGGUGAGGAGGGCGC | 1291 | 813 | GCGCCCUCCUCACCAGCUC | 1472 |
| 813 | CAGCGGGGACGACAGCCAG | 1292 | 813 | CAGCGGGGACGACAGCCAG | 1292 | 831 | CUGGCUGUCGUCCCCGCUG | 1473 |
| 831 | GCGGGUGCGUGCGCUCUUA | 1293 | 831 | GCGGGUGCGUGCGCUCUUA | 1293 | 849 | UAAGAGCGCACGCACCCGC | 1474 |
| 849 | AGAGAAACUUUCCCUGUCA | 1294 | 849 | AGAGAAACUUUCCCUGUCA | 1294 | 867 | UGACAGGGAAAGUUUCUCU | 1475 |
| 867 | AAAGGCUCCGGGGGGCGCG | 1295 | 867 | AAAGGCUCCGGGGGGCGCG | 1295 | 885 | CGCGCCCCCCGGAGCCUUU | 1476 |
| 885 | GGGUGUCCCCCGCUUGCCA | 1296 | 885 | GGGUGUCCCCCGCUUGCCA | 1296 | 903 | UGGCAAGCGGGGGACACCC | 1477 |
| 903 | AGAGCCCUGUUGCGGCCCC | 1297 | 903 | AGAGCCCUGUUGCGGCCCC | 1297 | 921 | GGGGCCGCAACAGGGCUCU | 1478 |
| 921 | CGAAACUUGUGCGCGCACG | 1298 | 921 | CGAAACUUGUGCGCGCACG | 1298 | 939 | CGUGCGCGCACAAGUUUCG | 1479 |
| 939 | GCCAAACUAACCUCACGUG | 1299 | 939 | GCCAAACUAACCUCACGUG | 1299 | 957 | CACGUGAGGUUAGUUUGGC | 1480 |
| 957 | GAAGUGACGGACUGUUCUA | 1300 | 957 | GAAGUGACGGACUGUUCUA | 1300 | 975 | UAGAACAGUCCGUCACUUC | 1481 |
| 975 | AUGACUGCAAAGAUGGAAA | 1301 | 975 | AUGACUGCAAAGAUGGAAA | 1301 | 993 | UUUCCAUCUUUGCAGUCAU | 1482 |
| 993 | ACGACCUUCUAUGACGAUG | 1302 | 993 | ACGACCUUCUAUGACGAUG | 1302 | 1011 | CAUCGUCAUAGAAGGUCGU | 1483 |
| 1011 | GCCCUCAACGCCUCGUUCC | 1303 | 1011 | GCCCUCAACGCCUCGUUCC | 1303 | 1029 | GGAACGAGGCGUUGAGGGC | 1484 |
| 1029 | CUCCCGUCCGAGAGCGGAC | 1304 | 1029 | CUCCCGUCCGAGAGCGGAC | 1304 | 1047 | GUCCGCUCUCGGACGGGAG | 1485 |
| 1047 | CCUUAUGGCUACAGUAACC | 1305 | 1047 | CCUUAUGGCUACAGUAACC | 1305 | 1065 | GGUUACUGUAGCCAUAAGG | 1486 |
| 1065 | CCCAAGAUCCUGAAACAGA | 1306 | 1065 | CCCAAGAUCCUGAAACAGA | 1306 | 1083 | UCUGUUUCAGGAUCUUGGG | 1487 |
| 1083 | AGCAUGACCCUGAACCUGG | 1307 | 1083 | AGCAUGACCCUGAACCUGG | 1307 | 1101 | CCAGGUUCAGGGUCAUGCU | 1488 |
| 1101 | GCCGACCCAGUGGGGAGCC | 1308 | 1101 | GCCGACCCAGUGGGGAGCC | 1308 | 1119 | GGCUCCCCACUGGGUCGGC | 1489 |
| 1119 | CUGAAGCCGCACCUCCGCG | 1309 | 1119 | CUGAAGCCGCACCUCCGCG | 1309 | 1137 | CGCGGAGGUGCGGCUUCAG | 1490 |
| 1137 | GCCAAGAACUCGGACCUCC | 1310 | 1137 | GCCAAGAACUCGGACCUCC | 1310 | 1155 | GGAGGUCCGAGUUCUUGGC | 1491 |
| 1155 | CUCACCUCGCCCGACGUGG | 1311 | 1155 | CUCACCUCGCCCGACGUGG | 1311 | 1173 | CCACGUCGGGCGAGGUGAG | 1492 |
| 1173 | GGGCUGCUCAAGCUGGCGU | 1312 | 1173 | GGGCUGCUCAAGCUGGCGU | 1312 | 1191 | ACGCCAGCUUGAGCAGCCC | 1493 |
| 1191 | UCGCCCGAGCUGGAGCGCC | 1313 | 1191 | UCGCCCGAGCUGGAGCGCC | 1313 | 1209 | GGCGCUCCAGCUCGGGCGA | 1494 |
| 1209 | CUGAUAAUCCAGUCCAGCA | 1314 | 1209 | CUGAUAAUCCAGUCCAGCA | 1314 | 1227 | UGCUGGACUGGAUUAUCAG | 1495 |
| 1227 | AACGGGCACAUCACCACCA | 1315 | 1227 | AACGGGCACAUCACCACCA | 1315 | 1245 | UGGUGGUGAUGUGCCCGUU | 1496 |
| 1245 | ACGCCGACCCCCACCCAGU | 1316 | 1245 | ACGCCGACCCCCACCCAGU | 1316 | 1263 | ACUGGGUGGGGGUCGGCGU | 1497 |
| 1263 | UUCCUGUGCCCCAAGAACG | 1317 | 1263 | UUCCUGUGCCCCAAGAACG | 1317 | 1281 | CGUUCUUGGGGCACAGGAA | 1498 |
| 1281 | GUGACAGAUGAGCAGGAGG | 1318 | 1281 | GUGACAGAUGAGCAGGAGG | 1318 | 1299 | CCUCCUGCUCAUCUGUCAC | 1499 |
| 1299 | GGGUUCGCCGAGGGCUUCG | 1319 | 1299 | GGGUUCGCCGAGGGCUUCG | 1319 | 1317 | CGAAGCCCUCGGCGAACCC | 1500 |
| 1317 | GUGCGCGCCCUGGCCGAAC | 1320 | 1317 | GUGCGCGCCCUGGCCGAAC | 1320 | 1335 | GUUCGGCCAGGGCGCGCAC | 1501 |
| 1335 | CUGCACAGCCAGAACACGC | 1321 | 1335 | CUGCACAGCCAGAACACGC | 1321 | 1353 | GCGUGUUCUGGCUGUGCAG | 1502 |
| 1353 | CUGCCCAGCGUCACGUCGG | 1322 | 1353 | CUGCCCAGCGUCACGUCGG | 1322 | 1371 | CCGACGUGACGCUGGGCAG | 1503 |
| 1371 | GCGGCGCAGCCGGUCAACG | 1323 | 1371 | GCGGCGCAGCCGGUCAACG | 1323 | 1389 | CGUUGACCGGCUGCGCCGC | 1504 |
| 1389 | GGGGCAGGCAUGGUGGCUC | 1324 | 1389 | GGGGCAGGCAUGGUGGCUC | 1324 | 1407 | GAGCCACCAUGCCUGCCCC | 1505 |
| 1407 | CCCGCGGUAGCCUCGGUGG | 1325 | 1407 | CCCGCGGUAGCCUCGGUGG | 1325 | 1425 | CCACCGAGGCUACCGCGGG | 1506 |
| 1425 | GCAGGGGGCAGCGGCAGCG | 1326 | 1425 | GCAGGGGGCAGCGGCAGCG | 1326 | 1443 | CGCUGCCGCUGCCCCCUGC | 1507 |
| 1443 | GGCGGCUUCAGCGCCAGCC | 1327 | 1443 | GGCGGCUUCAGCGCCAGCC | 1327 | 1461 | GGCUGGCGCUGAAGCCGCC | 1508 |
| 1461 | CUGCACAGCGAGCCGCCGG | 1328 | 1461 | CUGCACAGCGAGCCGCCGG | 1328 | 1479 | CCGGCGGCUCGCUGUGCAG | 1509 |
| 1479 | GUCUACGCAAACCUCAGCA | 1329 | 1479 | GUCUACGCAAACCUCAGCA | 1329 | 1497 | UGCUGAGGUUUGCGUAGAC | 1510 |
| 1497 | AACUUCAACCCAGGCGCGC | 1330 | 1497 | AACUUCAACCCAGGCGCGC | 1330 | 1515 | GCGCGCCUGGGUUGAAGUU | 1511 |
| 1515 | CUGAGCAGCGGCGGCGGGG | 1331 | 1515 | CUGAGCAGCGGCGGCGGGG | 1331 | 1533 | CCCCGCCGCCGCUGCUCAG | 1512 |
| 1533 | GCGCCCUCCUACGGCGCGG | 1332 | 1533 | GCGCCCUCCUACGGCGCGG | 1332 | 1551 | CCGCGCCGUAGGAGGGCGC | 1513 |
| 1551 | GCCGGCCUGGCCUUUCCCG | 1333 | 1551 | GCCGGCCUGGCCUUUCCCG | 1333 | 1569 | CGGGAAAGGCCAGGCCGGC | 1514 |
| 1569 | GCGCAACCCCAGCAGCAGC | 1334 | 1569 | GCGCAACCCCAGCAGCAGC | 1334 | 1587 | GCUGCUGCUGGGGUUGCGC | 1515 |
| 1587 | CAGCAGCCGCCGCACCACC | 1335 | 1587 | CAGCAGCCGCCGCACCACC | 1335 | 1605 | GGUGGUGCGGCGGCUGCUG | 1516 |
| 1605 | CUGCCCCAGCAGAUGCCCG | 1336 | 1605 | CUGCCCCAGCAGAUGCCCG | 1336 | 1623 | CGGGCAUCUGCUGGGGCAG | 1517 |
| 1623 | GUGCAGCACCCGCGGCUGC | 1337 | 1623 | GUGCAGCACCCGCGGCUGC | 1337 | 1641 | GCAGCCGCGGGUGCUGCAC | 1518 |
| 1641 | CAGGCCCUGAAGGAGGAGC | 1338 | 1641 | CAGGCCCUGAAGGAGGAGC | 1338 | 1659 | GCUCCUCCUUCAGGGCCUG | 1519 |
| 1659 | CCUCAGACAGUGCCCGAGA | 1339 | 1659 | CCUCAGACAGUGCCCGAGA | 1339 | 1677 | UCUCGGGCACUGUCUGAGG | 1520 |
| 1677 | AUGCCCGGCGAGACACCGC | 1340 | 1677 | AUGCCCGGCGAGACACCGC | 1340 | 1695 | GCGGUGUCUCGCCGGGCAU | 1521 |
| 1695 | CCCCUGUCCCCCAUCGACA | 1341 | 1695 | CCCCUGUCCCCCAUCGACA | 1341 | 1713 | UGUCGAUGGGGGACAGGGG | 1522 |
| 1713 | AUGGAGUCCCAGGAGCGGA | 1342 | 1713 | AUGGAGUCCCAGGAGCGGA | 1342 | 1731 | UCCGCUCCUGGGACUCCAU | 1523 |
| 1731 | AUCAAGGCGGAGAGGAAGC | 1343 | 1731 | AUCAAGGCGGAGAGGAAGC | 1343 | 1749 | GCUUCCUCUCCGCCUUGAU | 1524 |
| 1749 | CGCAUGAGGAACCGCAUCG | 1344 | 1749 | CGCAUGAGGAACCGCAUCG | 1344 | 1767 | CGAUGCGGUUCCUCAUGCG | 1525 |
| 1767 | GCUGCCUCCAAGUGCCGAA | 1345 | 1767 | GCUGCCUCCAAGUGCCGAA | 1345 | 1785 | UUCGGCACUUGGAGGCAGC | 1526 |
| 1785 | AAAAGGAAGCUGGAGAGAA | 1346 | 1785 | AAAAGGAAGCUGGAGAGAA | 1346 | 1803 | UUCUCUCCAGCUUCCUUUU | 1527 |
| 1803 | AUCGCCCGGCUGGAGGAAA | 1347 | 1803 | AUCGCCCGGCUGGAGGAAA | 1347 | 1821 | UUUCCUCCAGCCGGGCGAU | 1528 |
| 1821 | AAAGUGAAAACCUUGAAAG | 1348 | 1821 | AAAGUGAAAACCUUGAAAG | 1348 | 1839 | CUUUCAAGGUUUUCACUUU | 1529 |
| 1839 | GCUCAGAACUCGGAGCUGG | 1349 | 1839 | GCUCAGAACUCGGAGCUGG | 1349 | 1857 | CCAGCUCCGAGUUCUGAGC | 1530 |
| 1857 | GCGUCCACGGCCAACAUGC | 1350 | 1857 | GCGUCCACGGCCAACAUGC | 1350 | 1875 | GCAUGUUGGCCGUGGACGC | 1531 |
| 1875 | CUCAGGGAACAGGUGGCAC | 1351 | 1875 | CUCAGGGAACAGGUGGCAC | 1351 | 1893 | GUGCCACCUGUUCCCUGAG | 1532 |
| 1893 | CAGCUUAAACAGAAAGUCA | 1352 | 1893 | CAGCUUAAACAGAAAGUCA | 1352 | 1911 | UGACUUUCUGUUUAAGCUG | 1533 |
| 1911 | AUGAACCACGUUAACAGUG | 1353 | 1911 | AUGAACCACGUUAACAGUG | 1353 | 1929 | CACUGUUAACGUGGUUCAU | 1534 |
| 1929 | GGGUGCCAACUCAUGCUAA | 1354 | 1929 | GGGUGCCAACUCAUGCUAA | 1354 | 1947 | UUAGCAUGAGUUGGCACCC | 1535 |
| 1947 | ACGCAGCAGUUGCAAACAU | 1355 | 1947 | ACGCAGCAGUUGCAAACAU | 1355 | 1965 | AUGUUUGCAACUGCUGCGU | 1536 |
| 1965 | UUUUGAAGAGAGACCGUCG | 1356 | 1965 | UUUUGAAGAGAGACCGUCG | 1356 | 1983 | CGACGGUCUCUCUUCAAAA | 1537 |
| 1983 | GGGGGCUGAGGGGCAACGA | 1357 | 1983 | GGGGGCUGAGGGGCAACGA | 1357 | 2001 | UCGUUGCCCCUCAGCCCCC | 1538 |
| 2001 | AAGAAAAAAAAUAACACAG | 1358 | 2001 | AAGAAAAAAAAUAACACAG | 1358 | 2019 | CUGUGUUAUUUUUUUUCUU | 1539 |
| 2019 | GAGAGACAGACUUGAGAAC | 1359 | 2019 | GAGAGACAGACUUGAGAAC | 1359 | 2037 | GUUCUCAAGUCUGUCUCUC | 1540 |
| 2037 | CUUGACAAGUUGCGACGGA | 1360 | 2037 | CUUGACAAGUUGCGACGGA | 1360 | 2055 | UCCGUCGCAACUUGUCAAG | 1541 |
| 2055 | AGAGAAAAAAGAAGUGUCC | 1361 | 2055 | AGAGAAAAAAGAAGUGUCC | 1361 | 2073 | GGACACUUCUUUUUUCUCU | 1542 |
| 2073 | CGAGAACUAAAGCCAAGGG | 1362 | 2073 | CGAGAACUAAAGCCAAGGG | 1362 | 2091 | CCCUUGGCUUUAGUUCUCG | 1543 |
| 2091 | GUAUCCAAGUUGGACUGGG | 1363 | 2091 | GUAUCCAAGUUGGACUGGG | 1363 | 2109 | CCCAGUCCAACUUGGAUAC | 1544 |
| 2109 | GUUCGGUCUGACGGCGCCC | 1364 | 2109 | GUUCGGUCUGACGGCGCCC | 1364 | 2127 | GGGCGCCGUCAGACCGAAC | 1545 |
| 2127 | CCCAGUGUGCACGAGUGGG | 1365 | 2127 | CCCAGUGUGCACGAGUGGG | 1365 | 2145 | CCCACUCGUGCACACUGGG | 1546 |
| 2145 | GAAGGACUUGGUCGCGCCC | 1366 | 2145 | GAAGGACUUGGUCGCGCCC | 1366 | 2163 | GGGCGCGACCAAGUCCUUC | 1547 |
| 2163 | CUCCCUUGGCGUGGAGCCA | 1367 | 2163 | CUCCCUUGGCGUGGAGCCA | 1367 | 2181 | UGGCUCCACGCCAAGGGAG | 1548 |
| 2181 | AGGGAGCGGCCGCCUGCGG | 1368 | 2181 | AGGGAGCGGCCGCCUGCGG | 1368 | 2199 | CCGCAGGCGGCCGCUCCCU | 1549 |
| 2199 | GGCUGCCCCGCUUUGCGGA | 1369 | 2199 | GGCUGCCCCGCUUUGCGGA | 1369 | 2217 | UCCGCAAAGCGGGGCAGCC | 1550 |
| 2217 | ACGGGCUGUCCCCGCGCGA | 1370 | 2217 | ACGGGCUGUCCCCGCGCGA | 1370 | 2235 | UCGCGCGGGGACAGCCCGU | 1551 |
| 2235 | AACGGAACGUUGGACUUUC | 1371 | 2235 | AACGGAACGUUGGACUUUC | 1371 | 2253 | GAAAGUCCAACGUUCCGUU | 1552 |
| 2253 | CGUUAACAUUGACCAAGAA | 1372 | 2253 | CGUUAACAUUGACCAAGAA | 1372 | 2271 | UUCUUGGUCAAUGUUAACG | 1553 |
| 2271 | ACUGCAUGGACCUAACAUU | 1373 | 2271 | ACUGCAUGGACCUAACAUU | 1373 | 2289 | AAUGUUAGGUCCAUGCAGU | 1554 |
| 2289 | UCGAUCUCAUUCAGUAUUA | 1374 | 2289 | UCGAUCUCAUUCAGUAUUA | 1374 | 2307 | UAAUACUGAAUGAGAUCGA | 1555 |
| 2307 | AAAGGGGGGAGGGGGAGGG | 1375 | 2307 | AAAGGGGGGAGGGGGAGGG | 1375 | 2325 | CCCUCCCCCUCCCCCCUUU | 1556 |
| 2325 | GGGUUACAAACUGCAAUAG | 1376 | 2325 | GGGUUACAAACUGCAAUAG | 1376 | 2343 | CUAUUGCAGUUUGUAACCC | 1557 |
| 2343 | GAGACUGUAGAUUGCUUCU | 1377 | 2343 | GAGACUGUAGAUUGCUUCU | 1377 | 2361 | AGAAGCAAUCUACAGUCUC | 1558 |
| 2361 | UGUAGUACUCCUUAAGAAC | 1378 | 2361 | UGUAGUACUCCUUAAGAAC | 1378 | 2379 | GUUCUUAAGGAGUACUACA | 1559 |
| 2379 | CACAAAGCGGGGGGAGGGU | 1379 | 2379 | CACAAAGCGGGGGGAGGGU | 1379 | 2397 | ACCCUCCCCCCGCUUUGUG | 1560 |
| 2397 | UUGGGGAGGGGCGGCAGGA | 1380 | 2397 | UUGGGGAGGGGCGGCAGGA | 1380 | 2415 | UCCUGCCGCCCCUCCCCAA | 1561 |
| 2415 | AGGGAGGUUUGUGAGAGCG | 1381 | 2415 | AGGGAGGUUUGUGAGAGCG | 1381 | 2433 | CGCUCUCACAAACCUCCCU | 1562 |
| 2433 | GAGGCUGAGCCUACAGAUG | 1382 | 2433 | GAGGCUGAGCCUACAGAUG | 1382 | 2451 | CAUCUGUAGGCUCAGCCUC | 1563 |
| 2451 | GAACUCUUUCUGGCCUGCU | 1383 | 2451 | GAACUCUUUCUGGCCUGCU | 1383 | 2469 | AGCAGGCCAGAAAGAGUUC | 1564 |
| 2469 | UUUCGUUAACUGUGUAUGU | 1384 | 2469 | UUUCGUUAACUGUGUAUGU | 1384 | 2487 | ACAUACACAGUUAACGAAA | 1565 |
| 2487 | UACAUAUAUAUAUUUUUUA | 1385 | 2487 | UACAUAUAUAUAUUUUUUA | 1385 | 2505 | UAAAAAAUAUAUAUAUGUA | 1566 |
| 2505 | AAUUUGAUUAAAGCUGAUU | 1386 | 2505 | AAUUUGAUUAAAGCUGAUU | 1386 | 2523 | AAUCAGCUUUAAUCAAAUU | 1567 |
| 2523 | UACUGUCAAUAAACAGCUU | 1387 | 2523 | UACUGUCAAUAAACAGCUU | 1387 | 2541 | AAGCUGUUUAUUGACAGUA | 1568 |
| 2541 | UCAUGCCUUUGUAAGUUAU | 1388 | 2541 | UCAUGCCUUUGUAAGUUAU | 1388 | 2559 | AUAACUUACAAAGGCAUGA | 1569 |
| 2559 | UUUCUUGUUUGUUUGUUUG | 1389 | 2559 | UUUCUUGUUUGUUUGUUUG | 1389 | 2577 | CAAACAAACAAACAAGAAA | 1570 |
| 2577 | GGGUAUCCUGCCCAGUGUU | 1390 | 2577 | GGGUAUCCUGCCCAGUGUU | 1390 | 2595 | AACACUGGGCAGGAUACCC | 1571 |
| 2595 | UGUUUGUAAAUAAGAGAUU | 1391 | 2595 | UGUUUGUAAAUAAGAGAUU | 1391 | 2613 | AAUCUCUUAUUUACAAACA | 1572 |
| 2613 | UUGGAGCACUCUGAGUUUA | 1392 | 2613 | UUGGAGCACUCUGAGUUUA | 1392 | 2631 | UAAACUCAGAGUGCUCCAA | 1573 |
| 2631 | ACCAUUUGUAAUAAAGUAU | 1393 | 2631 | ACCAUUUGUAAUAAAGUAU | 1393 | 2649 | AUACUUUAUUACAAAUGGU | 1574 |
| 2649 | UAUAAUUUUUUUAUGUUUU | 1394 | 2649 | UAUAAUUUUUUUAUGUUUU | 1394 | 2667 | AAAACAUAAAAAAAUUAUA | 1575 |
| 2667 | UGUUUCUGAAAAUUCCAGA | 1395 | 2667 | UGUUUCUGAAAAUUCCAGA | 1395 | 2685 | UCUGGAAUUUUCAGAAACA | 1576 |
| 2685 | AAAGGAUAUUUAAGAAAAU | 1396 | 2685 | AAAGGAUAUUUAAGAAAAU | 1396 | 2703 | AUUUUCUUAAAUAUCCUUU | 1577 |
| 2703 | UACAAUAAACUAUUGGAAA | 1397 | 2703 | UACAAUAAACUAUUGGAAA | 1397 | 2721 | UUUCCAAUAGUUUAUUGUA | 1578 |
| 2721 | AGUACUCCCCUAACCUCUU | 1398 | 2721 | AGUACUCCCCUAACCUCUU | 1398 | 2739 | AAGAGGUUAGGGGAGUACU | 1579 |
| 2739 | UUUCUGCAUCAUCUGUAGA | 1399 | 2739 | UUUCUGCAUCAUCUGUAGA | 1399 | 2757 | UCUACAGAUGAUGCAGAAA | 1580 |
| 2757 | AUCCUAGUCUAUCUAGGUG | 1400 | 2757 | AUCCUAGUCUAUCUAGGUG | 1400 | 2775 | CACCUAGAUAGACUAGGAU | 1581 |
| 2775 | GGAGUUGAAAGAGUUAAGA | 1401 | 2775 | GGAGUUGAAAGAGUUAAGA | 1401 | 2793 | UCUUAACUCUUUCAACUCC | 1582 |
| 2793 | AAUGCUCGAUAAAAUCACU | 1402 | 2793 | AAUGCUCGAUAAAAUCACU | 1402 | 2811 | AGUGAUUUUAUCGAGCAUU | 1583 |
| 2811 | UCUCAGUGCUUCUUACUAU | 1403 | 2811 | UCUCAGUGCUUCUUACUAU | 1403 | 2829 | AUAGUAAGAAGCACUGAGA | 1584 |
| 2829 | UUAAGCAGUAAAAACUGUU | 1404 | 2829 | UUAAGCAGUAAAAACUGUU | 1404 | 2847 | AACAGUUUUUACUGCUUAA | 1585 |
| 2847 | UCUCUAUUAGACUUAGAAA | 1405 | 2847 | UCUCUAUUAGACUUAGAAA | 1405 | 2865 | UUUCUAAGUCUAAUAGAGA | 1586 |
| 2865 | AUAAAUGUACCUGAUGUAC | 1406 | 2865 | AUAAAUGUACCUGAUGUAC | 1406 | 2883 | GUACAUCAGGUACAUUUAU | 1587 |
| 2883 | CCUGAUGCUAUGUCAGGCU | 1407 | 2883 | CCUGAUGCUAUGUCAGGCU | 1407 | 2901 | AGCCUGACAUAGCAUCAGG | 1588 |
| 2901 | UUCAUACUCCACGCUCCCC | 1408 | 2901 | UUCAUACUCCACGCUCCCC | 1408 | 2919 | GGGGAGCGUGGAGUAUGAA | 1589 |
| 2919 | CCAGCGUAUCUAUAUGGAA | 1409 | 2919 | CCAGCGUAUCUAUAUGGAA | 1409 | 2937 | UUCCAUAUAGAUACGCUGG | 1590 |
| 2937 | AUUGCUUACCAAAGGCUAG | 1410 | 2937 | AUUGCUUACCAAAGGCUAG | 1410 | 2955 | CUAGCCUUUGGUAAGCAAU | 1591 |
| 2955 | GUGCGAUGUUUCAGGAGGC | 1411 | 2955 | GUGCGAUGUUUCAGGAGGC | 1411 | 2973 | GCCUCCUGAAACAUCGCAC | 1592 |
| 2973 | CUGGAGGAAGGGGGGUUGC | 1412 | 2973 | CUGGAGGAAGGGGGGUUGC | 1412 | 2991 | GCAACCCCCCUUCCUCCAG | 1593 |
| 2991 | CAGUGGAGAGGGACAGCCC | 1413 | 2991 | CAGUGGAGAGGGACAGCCC | 1413 | 3009 | GGGCUGUCCCUCUCCACUG | 1594 |
| 3009 | CACUGAGAAGUCAAACAUU | 1414 | 3009 | CACUGAGAAGUCAAACAUU | 1414 | 3027 | AAUGUUUGACUUCUCAGUG | 1595 |
| 3027 | UUCAAAGUUUGGAUUGCAU | 1415 | 3027 | UUCAAAGUUUGGAUUGCAU | 1415 | 3045 | AUGCAAUCCAAACUUUGAA | 1596 |
| 3045 | UCAAGUGGCAUGUGCUGUG | 1416 | 3045 | UCAAGUGGCAUGUGCUGUG | 1416 | 3063 | CACAGCACAUGCCACUUGA | 1597 |
| 3063 | GACCAUUUAUAAUGUUAGA | 1417 | 3063 | GACCAUUUAUAAUGUUAGA | 1417 | 3081 | UCUAACAUUAUAAAUGGUC | 1598 |
| 3081 | AAAUUUUACAAUAGGUGCU | 1418 | 3081 | AAAUUUUACAAUAGGUGCU | 1418 | 3099 | AGCACCUAUUGUAAAAUUU | 1599 |
| 3099 | UUAUUCUCAAAGCAGGAAU | 1419 | 3099 | UUAUUCUCAAAGCAGGAAU | 1419 | 3117 | AUUCCUGCUUUGAGAAUAA | 1600 |
| 3117 | UUGGUGGCAGAUUUUACAA | 1420 | 3117 | UUGGUGGCAGAUUUUACAA | 1420 | 3135 | UUGUAAAAUCUGCCACCAA | 1601 |
| 3135 | AAAGAUGUAUCCUUCCAAU | 1421 | 3135 | AAAGAUGUAUCCUUCCAAU | 1421 | 3153 | AUUGGAAGGAUACAUCUUU | 1602 |
| 3153 | UUUGGAAUCUUCUCUUUGA | 1422 | 3153 | UUUGGAAUCUUCUCUUUGA | 1422 | 3171 | UCAAAGAGAAGAUUCCAAA | 1603 |
| 3171 | ACAAUUCCUAGAUAAAAAG | 1423 | 3171 | ACAAUUCCUAGAUAAAAAG | 1423 | 3189 | CUUUUUAUCUAGGAAUUGU | 1604 |
| 3189 | GAUGGCCUUUGUCUUAUGA | 1424 | 3189 | GAUGGCCUUUGUCUUAUGA | 1424 | 3207 | UCAUAAGACAAAGGCCAUC | 1605 |
| 3207 | AAUAUUUAUAACAGCAUUC | 1425 | 3207 | AAUAUUUAUAACAGCAUUC | 1425 | 3225 | GAAUGCUGUUAUAAAUAUU | 1606 |
| 3225 | CUGUCACAAUAAAUGUAUU | 1426 | 3225 | CUGUCACAAUAAAUGUAUU | 1426 | 3243 | AAUACAUUUAUUGUGACAG | 1607 |
| 3234 | UAAAUGUAUUCAAAUACCA | 1427 | 3234 | UAAAUGUAUUCAAAUACCA | 1427 | 3252 | UGGUAUUUGAAUACAUUUA | 1608 |

The 3-ends of the Upper sequence and the Lower sequence of the siNA construct can include an overhang sequence, for example about 1, 2, 3, or 4 nucleotides in length, preferably 2 nucleotides in length, wherein the overhanging sequence of the lower sequence is optionally complementary to a portion of the target sequence.
The upper sequence is also referred to as the sense strand, whereas the lower sequence is also referred to as the antisense strand.
The upper and lower sequences in the Table can further comprise a chemical modification having Formulae I-VII or any combination thereof.

TABLE III
MAP Kinase Synthetic Modified siNA constructs

| | | | | | |
|---|---|---|---|---|---|
| Target | | Seq | | | Seq |
| Pos | Target | ID | Aliases | Sequence | ID |

MAPK1/ERK2

| | | | | | |
|---|---|---|---|---|---|
| 3302 | ACCAGACCUACUGCCAGAGAACC | 1113 | MAPK1:424U21 siRNA sense | CAGACCUACUGCCAGAGAATT | 1129 |
| 3852 | AUCACACAGGGUUCCUGACAGAA | 1114 | MAPK1:778U21 siRNA sense | CACACAGGGUUCCUGACAGTT | 1130 |
| 3892 | UUGGCUCUAGUCACUGGCAUCUC | 1115 | MAPK1:1718U21 siRNA sense | GGCUCUAGUCACUGGCAUCTT | 1131 |
| 3946 | ACUGUGGAGUUGACUCGGUGUUC | 1116 | MAPK1:2525U21 siRNA sense | UGUGGAGUUGACUCGGUGUTT | 1132 |
| 3302 | ACCAGACCUACUGCCAGAGAACC | 1113 | MAPK1:442L21 siRNA (424C) | UUCUCUGGCAGUAGGUCUGTT | 1133 |
| | | | antisense | | |
| 3852 | AUCACACAGGGUUCCUGACAGAA | 1114 | MAPK1:796L21 siRNA (778C) | CUGUCAGGAACCCUGUGUGTT | 1134 |
| | | | antisense | | |
| 3892 | UUGGCUCUAGUCACUGGCAUCUC | 1115 | MAPK1:1736L21 siRNA (1718C) | GAUGCCAGUGACUAGAGCCTT | 1135 |
| | | | antisense | | |
| 3946 | ACUGUGGAGUUGACUCGGUGUUC | 1116 | MAPK1:2543L21 siRNA (2525C) | ACACCGAGUCAACUCCACATT | 1136 |
| | | | antisense | | |
| 3302 | ACCAGACCUACUGCCAGAGAACC | 1113 | MAPK1:424U21 siRNA stab04 | B cAGAccuAcuGccAGAGAATT B | 1137 |
| | | | sense RPI 30817 | | |
| 3852 | AUCACACAGGGUUCCUGACAGAA | 1114 | MAPK1:778U21 siRNA stab04 | B cAcAcAGGGuuccuGAcAGTT B | 1138 |
| | | | sense RPI 30818 | | |
| 3892 | UUGGCUCUAGUCACUGGCAUCUC | 1115 | MAPK1:1718U21 siRNA stab04 | B GGcucuAGucAcuGGcAucTT B | 1139 |
| | | | sense RPI 30819 | | |
| 3946 | ACUGUGGAGUUGACUCGGUGUUC | 1116 | MAPK1:2525U21 siRNA stab04 | B uGuGGAGuuGAcucGGuGuTT B | 1140 |
| | | | sense RPI 30820 | | |
| 3302 | ACCAGACCUACUGCCAGAGAACC | 1113 | MAPK1:442L21 siRNA (424C) | uucucuGGcAGuAGGucuGTsT | 1141 |
| | | | stab05 antisense RPI 30821 | | |
| 3852 | AUCACACAGGGUUCCUGACAGAA | 1114 | MAPK1:796L21 siRNA (778C) | cuGucAGGAAcccuGuGuGTsT | 1142 |
| | | | stab05 antisense RPI 30822 | | |
| 3892 | UUGGCUCUAGUCACUGGCAUCUC | 1115 | MAPK1:1736L21 siRNA (1718C) | GAuGccAGuGAcuAGAGccTsT | 1143 |
| | | | stab05 antisense RPI 30823 | | |
| 3946 | ACUGUGGAGUUGACUCGGUGUUC | 1116 | MAPK1:2543L21 siRNA (2525C) | AcAccGAGucAAcuCCAcATsT | 1144 |
| | | | stab05 antisense RPI 30824 | | |
| 3302 | ACCAGACCUA0UGCCAGAGAACC | 1113 | MARK1:424U21 siRNA stab07 | B cAGAccuAcuGccAGAGAATT B | 1145 |
| | | | sense | | |
| 3852 | AUCACACAGGGUUCCUGACAGAA | 1114 | MARK1:778U21 siRNA stabo7 | B cAcAcAGGGuuccuGAcAGTT B | 1146 |
| | | | sense | | |
| 3892 | UUGGCUCUAGUCACUGGCAUCUC | 1115 | MAPK1:1718U21 siRNA stabo7 | B GGcucuAGucAcuGGcAucTTB 1147 | |
| | | | sense | | |
| 3946 | ACUGUGGAGUUGACUCGGUGUUC | 1116 | MARK1:2525U21 siRNA stabo7 | B uGuGGAGuuGAcucGGuGuTT B | 1148 |
| | | | sense | | |
| 3302 | ACCAGACCUACUGCCAGAGAACC | 1113 | MARK1:442L21 siRNA (424C) | uucucuGGcAGuAGGucuGTsT | 1149 |
| | | | stab11 antisense | | |
| 3852 | AUCACACAGGGUUCCUGACAGAA | 1114 | MARK1:796L21 siRNA (778C) | cuGucAGGAAcccuGuGuGTsT | 1150 |
| | | | stab11 antisense | | |
| 3892 | UUGGCUCUAGUCACUGGCAUCUC | 1115 | MARK1:1736L21 siRNA (1718C) | GAuGccAGuGAcuAGAGccTsT | 1151 |
| | | | stab11 antisense | | |
| 3946 | ACUGUGGAGUUGACUCGGUGUUC | 1116 | MARK1:2543L21 siRNA (25250) | AcAccGAGucAAcuccAcATsT | 1152 |
| | | | stab11 antisense | | |

| | | | | | |
|---|---|---|---|---|---|
| Target | | Seq | | | Seq |
| Pos | Target | ID | Aliases | Sequence | ID |

MAPK3/ERK1

| | | | | | |
|---|---|---|---|---|---|
| 283 | CCUUCGAACAUCAGACCUACUGC | 1117 | MAPK3:285U21 siRNA sense | UUCGAACAUCAGACCUACUTT | 1153 |
| 709 | UGAACUCCAAGGGCUAUACCAAG | 1118 | MAPK3:711U21 siRNA sense | AACUCCAAGGGCUAUACCATT | 1154 |
| 718 | AGGGCUAUACCAAGUCCAUCGAC | 1119 | MAPK3:720U21 siRNA sense | GGCUAUACCAAGUCCAUCGTT | 1155 |
| 1778 | UUCUGUGUGUGGUGAGCAGAAGU | 1120 | MAPK3:1780U21 siRNA sense | CUGUGUGUGGUGAGCAGAATT | 1156 |
| 283 | CCUUCGAACAUCAGACCUACUGC | 1117 | MAPK3:303L21 siRNA (285C) | AGUAGGUCUGAUGUUCGAATT | 1157 |
| | | | antisense | | |
| 709 | UGAACUCCAAGGGCUAUACCAAG | 1118 | MAPK3:729L21 siRNA (711C) | UGGUAUAGCCCUUGGAGUUTT | 1158 |
| | | | antisense | | |
| 718 | AGGGCUAUACCAAGUCCAUCGAC | 1119 | MAPK3:738L21 siRNA (720C) | CGAUGGACUUGGUAUAGCCTT | 1159 |
| | | | antisense | | |
| 1778 | UUCUGUGUGUGGUGAGCAGAAGU | 1120 | MAPK3:1798L21 siRNA (1780C) | UUCUGCUCACCACACACAGTT | 1160 |
| | | | antisense | | |
| 283 | CCUUCGAACAUCAGACCUACUGC | 1117 | MAPK3:285U21 siRNA stab04 sense | B uucGAAcAucAGAccuAcuTT B | 1161 |
| 709 | UGAACUCCAAGGGCUAUACCAAG | 1118 | MAPK3:711U21 siRNA stab04 sense | B AAcuccAAGGGcuAuAccATT B | 1162 |
| 718 | AGGGCUAUACCAAGUCCAUCGAC | 1119 | MAPK3:720U21 siRNA stab04 sense | B GGcuAuAccAAGuccAucGTT B | 1163 |
| 1778 | UUCUGUGUGUGGUGAGCAGAAGU | 1120 | MAPK3:1780U21 siRNA stab04 sense | B cuGuGuGuGGuGAGcAGAATT B | 1164 |
| 283 | CCUUCGAACAUCAGACCUACUGC | 1117 | MAPK3:303L21 siRNA (285C) stab05 | AGuAGGucuGAuGuucGAATsT | 1165 |
| | | | antisense | | |
| 709 | UGAACUCCAAGGGCUAUACCAAG | 1118 | MAPK3:729L21 siRNA (711C) stab05 | uGGuAuAGcccuuGGAGuuTsT | 1166 |
| | | | antisense | | |
| 718 | AGGGCUAUACCAAGUCCAUCGAC | 1119 | MAPK3:738L21 siRNA (720C) stab05 | cGAuGGAcuuGGuAuAGccTsT | 1167 |
| | | | antisense | | |
| 1778 | UUCUGUGUGUGGUGAGCAGAAGU | 1120 | MAPK3:1798L21 siRNA (1780C) | uucuGcucAccAcAcAcAGTsT | 1168 |
| | | | stab05 antisense | | |
| 283 | CCUUCGAACAUCAGACCUACUGC | 1117 | MAPK3:285U21 siRNA stab07 sense | B uucGAAcAucAGAccuAcuTT B | 1169 |
| 709 | UGAACUCCAAGGGCUAUACCAAG | 1118 | MAPK3:711U21 siRNA stab07 sense | B AAcuccAAGGGcuAuAccATT B | 1170 |
| 718 | AGGGCUAUACCAAGUCCAUCGAC | 1119 | MAPK3:720U21 siRNA stab07 sense | B GGcuAuAccAAGuccAucGTT B | 1171 |
| 1778 | UUCUGUGUGUGGUGAGCAGAAGU | 1120 | MAPK3:1780U21 siRNA stab07 sense | B cuGuGuGuGGuGAGcAGAATT B | 1172 |
| 283 | CCUUCGAACAUCAGACCUACUGC | 1117 | MAPK3:303L21 siRNA (285C) stab11 | AGuAGGucuGAuGuucGAATsT | 1173 |
| | | | antisense | | |
| 709 | UGAACUCCAAGGGCUAUACCAAG | 1118 | MAPK3:729L21 siRNA (711C) stab11 | uGGuAuAGcccuuGGAGuuTsT | 1174 |
| | | | antisense | | |
| 718 | AGGGCUAUACCAAGUCCAUCGAC | 1119 | MAPK3:738L21 siRNA (720C) stab11 | cGAuGGAcuuGGuAuAGccTsT | 1175 |
| | | | antisense | | |
| 1778 | UUCUGUGUGUGGUGAGCAGAAGU | 1120 | MAPK3:1798L21 siRNA (178C0) | uucuGcucAccAcAcAcAGTsT | 1176 |
| | | | stab11 antisense | | |

| | | | | | | |
|---|---|---|---|---|---|---|
| Target | | Seq | | | | Seq |
| Pos | Target | ID | RPI # | Aliases | Sequence | ID |

MAPK8/JNK1

| | | | | | | |
|---|---|---|---|---|---|---|
| 733 | AACAGCUUGGAACACCAUGUCCU | 1121 | 31517 | MAPK8:735U21 siRNA sense | CAGCUUGGAACACCAUGUCTT | 1177 |
| 853 | UUUUCCCAGCUGACUCAGAACAC | 1122 | 31518 | MAPK8:855U21 siRNA sense | UUCCCAGCUGACUCAGAACTT | 1178 |
| 1224 | CAAUGUCAACAGAUCCGACUUUG | 1123 | 31519 | MAPK8:1226U21 siRNA sense | AUGUCAACAGAUCCGACUUTT | 1179 |
| 1242 | CUUUGGCCUCUGAUACAGACAGC | 1124 | 31520 | MAPK8:1244U21 siRNA sense | UUGGCCUCUGAUACAGACATT | 1180 |
| 733 | AACAGCUUGGAACACCAUGUCCU | 1121 | 31521 | MAPK8:753L21 siRNA (735C) | GACAUGGUGUUCCAAGCUGTT | 1181 |
| | | | | antisense | | |
| 853 | UUUUCCCAGCUGACUCAGAACAC | 1122 | 31522 | MAPK8:873L21 siRNA (855C) | GUUCUGAGUCAGCUGGGAATT | 1182 |
| | | | | antisense | | |
| 1224 | CAAUGUCAACAGAUCCGACUUUG | 1123 | 31523 | MAPK8:1244L21 siRNA (1226C) | AAGUCGGAUCUGUUGACAUTT | 1183 |
| | | | | antisense | | |
| 1242 | CUUUGGCCUCUGAUACAGACAGC | 1124 | 31524 | MAPK8:1262L21 siRNA (1244C) | UGUCUGUAUCAGAGGCCAATT | 1184 |
| | | | | antisense | | |
| 733 | AACAGCUUGGAACACCAUGUCCU | 1121 | | MAPK8:735U21 siRNA stab4 | B cAGcuuGGAAcAccAuGucTT B | 1185 |
| | | | | sense | | |
| 853 | UUUUCCCAGCUGACUCAGAACAC | 1122 | | MAPK8:855U21 siRNA stab4 | B uucccAGcuGAcucAGAAcTT B | 1186 |
| | | | | sense | | |
| 1224 | CAAUGUCAACAGAUCCGACUUUG | 1123 | | MAPK8:1226U21 siRNA stab4 | BAuGucAAcAGAuccGAcuuTTB | 1187 |
| | | | | sense | | |
| 1242 | CUUUGGCCUCUGAUACAGACAGC | 1124 | | MAPK8:1244U21 siRNA stab4 | B uuGGccucuGAuAcAGAcATT B | 1188 |
| | | | | sense | | |
| 733 | AACAGCUUGGAACACCAUGUCCU | 1121 | | MAPK8:753L21 siRNA (735C) | GAcAuGGuGuuccAAGcuGTsT | 1189 |
| | | | | stab5 antisense | | |
| 853 | UUUUCCCAGCUGACUCAGAACAC | 1122 | | MAPK8:873L21 siRNA (855C) | GuucuGAGucAGcuGGGAATsT | 1190 |
| | | | | stab5 antisense | | |
| 1224 | CAAUGUCAACAGAUCCGACUUUG | 1123 | | MAPK8:1244L21 siRNA (1226C) | AAGucGGAucuGuuGAcAuTsT | 1191 |
| | | | | stab5 antisense | | |
| 1242 | CUUUGGCCUCUGAUACAGACAGC | 1124 | | MAPK8:1262L21 siRNA (1244C) | uGucuGuAucAGAGGccAATsT | 1192 |
| | | | | stab5 antisense | | |
| 733 | AACAGCUUGGAACACCAUGUCCU | 1121 | | MAPK8:735U21 siRNA stab7 | BcAGcuuGGAAcAccAuGucTTB | 1193 |
| | | | | sense | | |
| 853 | UUUUCCCAGCUGACUCAGAACAC | 1122 | | MAPK8:855U21 siRNA stab7 | B uucccAGcuGAcucAGAAcTT B | 1194 |
| | | | | sense | | |
| 1224 | CAAUGUCAACAGAUCCGACUUUG | 1123 | | MAPK8:1226U21 siRNA stab7 | B AuGucAAcAGAuccGAcuuTT B | 1195 |
| | | | | sense | | |
| 1242 | CUUUGGCCUCUGAUACAGACAGC | 1124 | | MAPK8:1244U21 siRNA stab7 | B uuGGccucuGAuAcAGAcATT B | 1196 |
| | | | | sense | | |
| 733 | AACAGCUUGGAACACCAUGUCCU | 1121 | | MAPK8:753L21 siRNA (735C) | GAcAuGGuGuuccAAGcuGTsT | 1197 |
| | | | | stab11 antisense | | |
| 853 | UUUUCCCAGCUGACUCAGAACAC | 1122 | | MAPK8:873L21 siRNA (855C) | GuucuGAGucAGcuGGGAATsT | 1198 |
| | | | | stab11 antisense | | |
| 1224 | CAAUGUCAACAGAUCCGACUUUG | 1123 | | MAPK8:1244L21 siRNA (1226C) | AAGucGGAucuGuuGAcAuTsT | 1199 |
| | | | | stab11 antisense | | |
| 1242 | CUUUGGCCUCUGAUACAGACAGC | 1124 | | MAPK8:1262L21 siRNA (1244C) | uGucuGuAucAGAGGccAATsT | 1200 |
| | | | | stab11 antisense | | |

| | | | | | | |
|---|---|---|---|---|---|---|
| Target | | Seq | | | | |
| Pos | Target | ID | RPI # | Aliases | Sequence | ID |

MAPK14/p38

| | | | | | | |
|---|---|---|---|---|---|---|
| 1278 | GCCUACUUUGCUCAGUACCACGA | 1125 | 31586 | MAPK14:1280U21 siRNA sense | CUACUUUGCUCAGUACCACTT | 1201 |
| 1609 | UGUCUGUCUUUGUGGGAGGGUAA | 1126 | 31587 | MARK14:1611U21 siRNA sense | UCUGUCUUUGUGGGAGGGUTT | 1202 |
| 2882 | AAAAGGGUCUUCUUGGCAGCUUA | 1127 | 31588 | MAPK14:2884U21 siRNA sense | AAGGGUCUUCUUGGCAGCUTT | 1203 |
| 3554 | GGACUCUAAGCUGGAGCUCUUGG | 1128 | 31589 | MAPK14:3556U21 siRNA sense | ACUCUAAGCUGGAGCUCUUTT | 1204 |
| 1278 | GCCUACUUUGCUCAGUACCACGA | 1125 | 31590 | MAPK14:1298L21 siRNA (1280C) | GUGGUACUGAGCAAAGUAGTT | 1205 |
| | | | | antisense | | |
| 1609 | UGUCUGUCUUUGUGGGAGGGUAA | 1126 | 31591 | MAPK14:1629L21 siRNA (1611C) | ACCCUCCCACAAAGACAGATT | 1206 |
| | | | | antisense | | |
| 2882 | AAAAGGGUCUUCUUGGCAGCUUA | 1127 | 31592 | MARK14:2902L21 siRNA (2884C) | AGCUGCCAAGAAGACCCUUTT | 1207 |
| | | | | antisense | | |
| 3554 | GGACUCUAAGCUGGAGCUCUUGG | 1128 | 31593 | MAPK14:3574L21 siRNA (3556C) | AAGAGCUCCAGCUUAGAGUTT | 1208 |
| | | | | antisense | | |
| 1278 | GCCUACUUUGCUCAGUACCACGA | 1125 | | MAPK14:1280U21 siRNA stab04 | B cuAcuuuGcucAGuAccAcTT B | 1209 |
| | | | | sense | | |
| 1609 | UGUCUGUCUUUGUGGGAGGGUAA | 1126 | | MARK14:1611U21 siRNA stab04 | B ucuGucuuuGuGGGAGGGuTT B | 1210 |
| | | | | sense | | |
| 2882 | AAAAGGGUCUUCUUGGCAGCUUA | 1127 | | MAPK14:2884U21 siRNA stab04 | B AAGGGucuucuuGGcAGcuTT B | 1211 |
| | | | | sense | | |
| 3554 | GGACUCUAAGCUGGAGCUCUUGG | 1128 | | MAPK14:3556U21 siRNA stab04 | B AcucuAAGcuGGAGcucuuTT B | 1212 |
| | | | | sense | | |
| 1278 | GCCUACUUUGCUCAGUACCACGA | 1125 | | MAPK14:1298L21 siRNA (1280C) | GuGGuAcuGAGcAAAGuAGTsT | 1213 |
| | | | | stab05 antisense | | |
| 1609 | UGUCUGUCUUUGUGGGAGGGUAA | 1126 | | MARK14:1629L21 siRNA (1611C) | AcccucccAcAAAGAcAGATsT | 1214 |
| | | | | stab05 antisense | | |
| 2882 | AAAAGGGUCUUCUUGGCAGCUUA | 1127 | | MAPK14:2902L21 siRNA (2884C) | AGcuGccAAGAAGAcccuuTsT | 1215 |
| | | | | stab05 antisense | | |
| 3554 | GGACUCUAAGCUGGAGCUCUUGG | 1128 | | MARK14:3574L21 siRNA (3556C) | AAGAGcuccAGcuuAGAGuTsT | 1216 |
| | | | | stab05 antisense | | |
| 1278 | GCCUACUUUGCUCAGUACCACGA | 1125 | | MAPK14:1280U21 siRNA stab07 | B cuAcuuuGcucAGuAccAcTT B | 1217 |
| | | | | sense | | |
| 1609 | UGUCUGUCUUUGUGGGAGGGUAA | 1126 | | MARK14:1611U21 siRNA stab07 | B ucuGucuuuGuGGGAGGGuTT B | 1218 |
| | | | | sense | | |
| 2882 | AAAAGGGUCUUCUUGGCAGCUUA | 1127 | | MAPK14:2884U21 siRNA stab07 | B AAGGGucuucuuGGcAGcuTT B | 1219 |
| | | | | sense | | |
| 3554 | GGACUCUAAGCUGGAGCUCUUGG | 1128 | | MAPK14:3556U21 siRNA stab07 | B AcucuAAGcuGGAGcucuuTT B | 1220 |
| | | | | sense | | |
| 1278 | GCCUACUUUGCUCAGUACCACGA | 1125 | | MAPK14:1298L21 siRNA (1280C) | GuGGuAcuGAGcAAAGuAGTsT | 1221 |
| | | | | stab11 antisense | | |
| 1609 | UGUCUGUCUUUGUGGGAGGGUAA | 1126 | | MARK14:1629L21 siRNA (1611C) | AcccucccAcAAAGAcAGATsT | 1222 |
| | | | | stab11 antisense | | |
| 2882 | AAAAGGGUCUUCUUGGCAGCUUA | 1127 | | MAPK14:2902L21 siRNA (2884C) | AGcuGccAAGAAGAcccuuTsT | 1223 |
| | | | | stab11 antisense | | |
| 3554 | GGACUCUAAGCUGGAGCUCUUGG | 1128 | | MAPK14:3574L21 siRNA (3556C) | AAGAGcuccAGcuuAGAGuTsT | 1224 |
| | | | | stab11 antisense | | |

| | | | | | | |
|---|---|---|---|---|---|---|
| Target | | Seq | | | | Seq |
| Pos | Target | ID | RPI# | Aliases | Sequence | ID |

c-JUN

| | | | | | | |
|---|---|---|---|---|---|---|
| 1817 | GGAAAAAGUGAAAACCUUGAAAG | 1609 | | JUN:1819U21 siRNA sense | AAAAAGUGAAAACCUUGAATT | 1617 |
| 1935 | CAACUCAUGCUAACGCAGCAGUU | 1610 | | JUN:1937U21 siRNA sense | ACUCAUGCUAACGCAGCAGTT | 1618 |
| 2259 | CAUUGACCAAGAACUGCAUGGAC | 1611 | | JUN:2261U21 siRNA sense | UUGACCAAGAACUGCAUGGTT | 1619 |
| 2264 | ACCAAGAACUGCAUGGACCUAAC | 1612 | | JUN:2266U21 siRNA sense | CAAGAACUGCAUGGACCUATT | 1620 |
| 2269 | GAACUGCAUGGACCUAACAUUCG | 1613 | | JUN:2271U21 siRNA sense | ACUGCAUGGACCUAACAUUTT | 1621 |
| 2270 | AACUGCAUGGACCUAACAUUCGA | 1614 | | JUN:2272U21 siRNA sense | CUGCAUGGACCUAACAUUCTT | 1622 |
| 2272 | CUGCAUGGACCUAACAUUCGAUC | 1615 | | JUN:2274U21 siRNA sense | GCAUGGACCUAACAUUCGATT | 1623 |
| 2274 | GCAUGGACCUAACAUUCGAUCUC | 1616 | | JUN:2276U21 siRNA sense | AUGGACCUAACAUUCGAUCTT | 1624 |
| 1817 | GGAAAAAGUGAAAACCUUGAAAG | 1609 | | JUN:1837L21 siRNA (1819C) | UUCAAGGUUUUCACUUUUUTT | 1625 |
| | | | | antisense | | |
| 1935 | CAACUCAUGCUAACGCAGCAGUU | 1610 | | JUN:1955L21 siRNA (1937C) | CUGCUGCGUUAGCAUGAGUTT | 1626 |
| | | | | antisense | | |
| 2259 | CAUUGACCAAGAACUGCAUGGAC | 1611 | | JUN:2279L21 siRNA (2261C) | CCAUGCAGUUCUUGGUCAATT | 1627 |
| | | | | antisense | | |
| 2264 | ACCAAGAACUGCAUGGACCUAAC | 1612 | | JUN:2284L21 siRNA (2266C) | UAGGUCCAUGCAGUUCUUGTT | 1628 |
| | | | | antisense | | |
| 2269 | GAACUGCAUGGACCUAACAUUCG | 1613 | | JUN:2289L21 siRNA (2271C) | AAUGUUAGGUCCAUGCAGUTT | 1629 |
| | | | | antisense | | |
| 2270 | AACUGCAUGGACCUAACAUUCGA | 1614 | | JUN:2290L21 siRNA (2272C) | GAAUGUUAGGUCCAUGCAGTT | 1630 |
| | | | | antisense | | |
| 2272 | CUGCAUGGACCUAACAUUCGAUC | 1615 | | JUN:2292L21 siRNA (2274C) | UCGAAUGUUAGGUCCAUGCTT | 1631 |
| | | | | antisense | | |
| 2274 | GCAUGGACCUAACAUUCGAUCUC | 1616 | | JUN:2294L21 siRNA (2276C) | GAUCGAAUGUUAGGUCCAUTT | 1632 |
| | | | | antisense | | |
| 1817 | GGAAAAAGUGAAAACCUUGAAAG | 1609 | | JUN:1819U21 siRNA stab04 | B AAAAAGuGAAAAccuuGAATT B | 1633 |
| | | | | sense | | |
| 1935 | CAACUGAUGCUAACGCAGCAGUU | 1610 | | JUN:1937U21 siRNA stab04 | B AcucAuGcuAAcGcAGcAGTT B | 1634 |
| | | | | sense | | |
| 2259 | CAUUGACCAAGAACUGCAUGGAC | 1611 | | JUN:2261U21 siRNA stab04 | B uuGAccAAGAAcuGcAuGGTT B | 1635 |
| | | | | sense | | |
| 2264 | ACCAAGAACUGCAUGGACCUAAC | 1612 | | JUN:2266U21 siRNA stab04 | B cAAGAAcuGcAuGGAccuATT B | 1636 |
| | | | | sense | | |
| 2269 | GAACUGCAUGGACCUAACAUUCG | 1613 | | JUN:2271U21 siRNA stab04 | B AcuGcAuGGAccuAAcAuuTT B | 1637 |
| | | | | sense | | |
| 2270 | AACUGCAUGGACCUAACAUUCGA | 1614 | | JUN:2272U21 siRNA stab04 | B cuGcAuGGAccuAAcAuucTT B | 1638 |
| | | | | sense | | |
| 2272 | CUGCAUGGACCUAACAUUCGAUC | 1615 | | JUN:2274U21 siRNA stab04 | B GcAuGGAccuAAcAuucGATT B | 1639 |
| | | | | sense | | |
| 2274 | GCAUGGACCUAACAUUCGAUCUC | 1616 | | JUN:2276U21 siRNA stab04 | B AuGGAccuAAcAuucGAucTT B | 1640 |
| | | | | sense | | |
| 1817 | GGAAAAAGUGAAAACCUUGAAAG | 1609 | | JUN:1837L21 siRNA (1819C) | uucAAGGuuuucAcuuuuuTsT | 1641 |
| | | | | stab05 antisense | | |
| 1935 | CAACUCAUGCUAACGCAGCAGUU | 1610 | | JUN:1955L21 siRNA (1937C) | cuGcuGcGuuAGcAuGAGuTsT | 1642 |
| | | | | stab05 antisense | | |
| 2259 | CAUUGACCAAGAACUGCAUGGAC | 1611 | | JUN:2279L21 siRNA (2261C) | ccAuGcAGuucuuGGucAATsT | 1643 |
| | | | | stab05 antisense | | |
| 2264 | ACCAAGAACUGCAUGGACCUAAC | 1612 | | JUN:2284L21 siRNA (2266C) | uAGGuccAuGcAGuucuuGTsT | 1644 |
| | | | | stab05 antisense | | |
| 2269 | GAACUGCAUGGACCUAACAUUCG | 1613 | | JUN:2289L21 siRNA (2271C) | AAuGuuAGGuccAuGcAGuTsT | 1645 |
| | | | | stab05 antisense | | |
| 2270 | AACUGCAUGGACCUAACAUUCGA | 1614 | | JUN:2290L21 siRNA (2272C) | GAAuGuuAGGuccAuGcAGTsT | 1646 |
| | | | | stab05 antisense | | |
| 2272 | CUGCAUGGACCUAACAUUCGAUC | 1615 | | JUN:2292L21 siRNA (2274C) | ucGAAuGuuAGGuccAuGcTsT | 1647 |
| | | | | stab05 antisense | | |
| 2274 | GCAUGGACCUAACAUUCGAUCUG | 1616 | | JUN:2294L21 siRNA (2276C) | GAucGAAuGuuAGGuccAuTsT | 1648 |
| | | | | stab05 antisense | | |
| 1817 | GGAAAAAGUGAAAACCUUGAAAG | 1609 | 31818 | JUN:1819U21 siRNA stab07 | B AAAAAGuGAAAAccuuGAATT B | 1649 |
| | | | | sense | | |
| 1935 | CAACUCAUGCUAACGCAGCAGUU | 1610 | 31819 | JUN:1937U21 siRNA stab07 | B AcucAuGcuAAcGcAGcAGTT B | 1650 |
| | | | | sense | | |
| 2259 | CAUUGACCAAGAACUGCAUGGAC | 1611 | 31820 | JUN:2261U21 siRNA stab07 | B uuGAccAAGAAcuGcAuGGTT B | 1651 |
| | | | | sense | | |
| 2264 | ACCAAGAACUGCAUGGACCUAAC | 1612 | 31821 | JUN:2266U21 siRNA stab07 | B cAAGAAcuGcAuGGAccuATT B | 1652 |
| | | | | sense | | |
| 2269 | GAACUGCAUGGACCUAACAUUCG | 1613 | 31822 | JUN:2271U21 siRNA stab07 | B AcuGcAuGGAccuAAcAuuTT B | 1653 |
| | | | | sense | | |
| 2270 | AACUGCAUGGACCUAACAUUCGA | 1614 | 31823 | JUN:2272U21 siRNA stab07 | B cuGcAuGGAccuAAcAuucTT B | 1654 |
| | | | | sense | | |
| 2272 | CUGCAUGGACCUAACAUUCGAUC | 1615 | 31824 | JUN:2274U21 siRNA stab07 | B GcAuGGAccuAAcAuucGATT B | 1655 |
| | | | | sense | | |
| 2274 | GCAUGGACCUAACAUUCGAUCUG | 1616 | 31825 | JUN:2276U21 siRNA stab07 | B AuGGAccuAAcAuucGAucTT B | 1656 |
| | | | | sense | | |
| 1817 | GGAAAAAGUGAAAACCUUGAAAG | 1609 | | JUN:1837L21 siRNA (1819C) | uucAAGGuuuucAcuuuuuTsT | 1657 |
| | | | | stab11 antisense | | |
| 1935 | CAACUCAUGCUAACGCAGCAGUU | 1610 | | JUN:1955L21 siRNA (1937C) | cuGcuGcGuuAGcAuGAGuTsT | 1658 |
| | | | | stab11 antisense | | |
| 2259 | CAUUGACCAAGAACUGCAUGGAC | 1611 | | JUN:2279L21 siRNA (2261C) | ccAucAGuucuuGGucAATsT | 1659 |
| | | | | stab11 antisense | | |
| 2264 | ACCAAGAACUGCAUGGACCUAAC | 1612 | | JUN:2284L21 siRNA (2266C) | uAGGuccAuGcAGuucuuGTsT | 1660 |
| | | | | stab11 antisense | | |
| 2269 | GAACUGCAUGGACCUAACAUUCG | 1613 | | JUN:2289L21 siRNA (2271C) | AAuGuuAGGuccAuGcAGuTsT | 1661 |
| | | | | stab11 antisense | | |
| 2270 | AACUGCAUGGACCUAACAUUCGA | 1614 | | JUN:2290L21 siRNA (2272C) | GAAuGuuAGGuccAuGcAGTsT | 1662 |
| | | | | stab11 antisense | | |
| 2272 | CUGCAUGGACCUAACAUUCGAUC | 1615 | | JUN:2292L21 siRNA (2274C) | ucGAAuGuuAGGuccAuGcTsT | 1663 |
| | | | | stab11 antisense | | |
| 2274 | GCAUGGACCUAACAUUCGAUCUC | 1616 | | JUN:2294L21 siRNA (2276C) | GAucGAAuGuuAGGuccAuTsT | 1664 |
| | | | | stab11 antisense | | |
| 1817 | GGAAAAAGUGAAAACCUUGAAAG | 1609 | | JUN:1819U21 siRNA stab08 | AAAAAGuGAAAAccuuGAATsT | 1665 |
| | | | | sense | | |
| 1935 | CAACUCAUGCUAACGCAGCAGUU | 1610 | | JUN:1937U21 siRNA stab08 | AcucAuGcuAAcGcAGcAGTsT | 1666 |
| | | | | sense | | |
| 2259 | CAUUGACCAAGAACUGCAUGGAC | 1611 | | JUN:2261U21 siRNA stab08 | uuGAccAAGAAcuGcAuGGTsT | 1667 |
| | | | | sense | | |
| 2264 | ACCAAGAACUGCAUGGACCUAAC | 1612 | | JUN:2266U21 siRNA stab08 | cAAGAAcuGcAuGGAccuATsT | 1668 |
| | | | | sense | | |
| 2269 | GAACUGCAUGGACCUAACAUUCG | 1613 | | JUN:2271U21 siRNA stab08 | AcuGcAuGGAccuAAcAuuTsT | 1669 |
| | | | | sense | | |
| 2270 | AACUGCAUGGACCUAACAUUCGA | 1614 | | JUN:2272U21 siRNA stab08 | cuGcAuGGAccuAAcAuucTsT | 1670 |
| | | | | sense | | |
| 2272 | CUGCAUGGACCUAACAUUCGAUC | 1615 | | JUN:2274U21 siRNA stabo8 | GcAuGGAccuAAcAuucGATsT | 1671 |
| | | | | sense | | |
| 2274 | GCAUGGACCUAACAUUCGAUCUC | 1616 | | JUN:2276U21 siRNA stabo8 | AuGGAccuAAcAuucGAucTsT | 1672 |
| | | | | sense | | |
| 1817 | GGAAAAAGUGAAAACCUUGAAAG | 1609 | 31826 | JUN:1837L21 siRNA (1819C) | uucAAGGuuuucAcuuuuuTsT | 1673 |
| | | | | stab08 antisense | | |
| 1935 | CAACUCAUGCUAACGCAGCAGUU | 1610 | 31827 | JUN:1955L21 siRNA (1937C) | cuGcuGcGuuAGcAuGAGuTsT | 1674 |
| | | | | stab08 antisense | | |
| 2259 | CAUUGACCAAGAACUGCAUGGAC | 1611 | 31828 | JUN:2279L21 siRNA (2261C) | ccAuGcAGuucuuGGucAATsT | 1675 |
| | | | | stab08 antisense | | |
| 2264 | ACCAAGAACUGCAUGGACCUAAC | 1612 | 31829 | JUN:2284L21 siRNA (2266C) | uAGGuccAuGcAGuucuuGTsT | 1676 |
| | | | | stab08 antisense | | |
| 2269 | GAACUGCAUGGACCUAACAUUCG | 1613 | 31830 | JUN:2289L21 siRNA (2271C) | AAuGuuAGGuccAuGcAGuTsT | 1677 |
| | | | | stab08 antisense | | |
| 2270 | AACUGCAUGGACCUAACAUUCGA | 1614 | 31831 | JUN:2290L21 siRNA (2272C) | GAAuGuuAGGuccAuGcAGTsT | 1678 |
| | | | | stab08 antisense | | |
| 2272 | CUGCAUGGACCUAACAUUCGAUC | 1615 | 31832 | JUN:2292L21 siRNA (2274C) | ucGAAuGuuAGGuccAuGcTsT | 1679 |
| | | | | stab08 antisense | | |
| 2274 | GCAUGGACCUAACAUUCGAUCUC | 1616 | 31833 | JUN:2294L21 siRNA (2276C) | GAucGAAuGuuAGGuccAuTsT | 1680 |
| | | | | stab08 antisense | | |
| 1817 | GGAAAAAGUGAAAACCUUGAAAG | 1609 | 31834 | JUN:1819U21 siRNA inv stab07 | B AAGuuccAAAAGuGAAAAATT B | 1681 |
| | | | | sense | | |
| 1935 | CAACUCAUGCUAACGCAGCAGUU | 1610 | 31835 | JUN:1937U21 siRNA inv stab07 | B GAcGAcGcAAucGuAcucATT B | 1682 |
| | | | | sense | | |
| 2259 | CAUUGACCAAGAACUGCAUGGAC | 1611 | 31836 | JUN:2261U21 siRNA inv stab07 | B GGuAcGucAAGAAccAGuuTT B | 1683 |
| | | | | sense | | |
| 2264 | ACCAAGAACUGCAUGGACCUAAC | 1612 | 31837 | JUN:2266U21 siRNA inv stab07 | B AuccAGGuAcGucAAGAAcTT B | 1684 |
| | | | | sense | | |
| 2269 | GAACUGCAUGGACCUAACAUUCG | 1613 | 31838 | JUN:2271U21 siRNA inv stab07 | B uuAcAAuccAGGuAcGucATT B | 1685 |
| | | | | sense | | |
| 2270 | AACUGCAUGGACCUAACAUUCGA | 1614 | 31839 | JUN:2272U21 siRNA inv stab07 | B cuuAcAAuccAGGuAcGucTT B | 1686 |
| | | | | sense | | |
| 2272 | CUGCAUGGACCUAACAUUCGAUC | 1615 | 31840 | JUN:2274U21 siRNA inv stab07 | B AGcuuAcAAuccAGGuAcGTT B | 1687 |
| | | | | sense | | |
| 2274 | GCAUGGACCUAACAUUCGAUCUC | 1616 | 31841 | JUN:2276U21 siRNA inv stab07 | B cuAGcuuAcAAuccAGGuATT B | 1688 |
| | | | | sense | | |
| 1817 | GGAAAAAGUGAAAACCUUGAAAG | 1609 | 31842 | JUN:1837L21 siRNA (1819C) | uuuuucAcuuuuGGAAcuuTsT | 1689 |
| | | | | inv stab08 antisense | | |
| 1935 | CAACUCAUGCUAACGCAGCAGUU | 1610 | 31843 | JUN:1955L21 siRNA (1937C) | uGAGuAcGAuuGcGucGucTsT | 1690 |
| | | | | inv stab08 antisense | | |
| 2259 | CAUUGACCAAGAACUGCAUGGAC | 1611 | 31844 | JUN:2279L21 siRNA (2261C) | AAcuGGuucuuGAcGuAccTsT | 1691 |
| | | | | inv stab08 antisense | | |
| 2264 | ACCAAGAACUGCAUGGACCUAAC | 1612 | 31845 | JUN:2284L21 siRNA (2266C) | GuucuuGAcGuAccuGGAuTsT | 1692 |
| | | | | inv stab08 antisense | | |
| 2269 | GAACUGCAUGGACCUAACAUUCG | 1613 | 31846 | JUN:2289L21 siRNA (2271C) | uGAcGuAccuGGAuuGuAATsT | 1693 |
| | | | | inv stab08 antisense | | |
| 2270 | AACUGCAUGGACCUAACAUUCGA | 1614 | 31847 | JUN:2290L21 siRNA (2272C) | GAcGuAccuGGAuuGuAAGTsT | 1694 |
| | | | | inv stab08 antisense | | |
| 2272 | CUGCAUGGACCUAACAUUCGAUC | 1615 | 31848 | JUN:2292L21 siRNA (2274C) | cGuAccuGGAuuGuAAGcuTsT | 1695 |
| | | | | inv stab08 antisense | | |
| 2274 | GCAUGGACCUAACAUUCGAUCUC | 1616 | 31849 | JUN:2294L21 siRNA (2276C) | uAccuGGAuuGuAAGcuAGTsT | 1696 |
| | | | | inv stab08 antisense | | |

Uppercase = ribonucleotide
u,c = 2′-deoxy-2′-fluoro U, C
A = 2′-O-methyl Adenosine
G = 2′-O-methyl Guanosine
T = thymidine
B = inverted deoxy abasic
s = phosphorothioate linkage
A = deoxy Adenosine
G = deoxy Guanosine

TABLE IV
Non-limiting examples of Stabilization Chemistries
for chemically modified siNA constructs

| Chemistry | pyrimidine | Purine | cap | p = S | Strand |
|---|---|---|---|---|---|
| “Stab 1” | Ribo | Ribo | — | 5 at 5′-end | S/AS |
| | | | | 1 at 3′-end | |
| “Stab 2” | Ribo | Ribo | — | All linkages | Usually AS |
| “Stab 3” | 2′-fluoro | Ribo | — | 4 at 5′-end | Usually S |
| | | | | 4 at 3′-end | |
| “Stab 4” | 2′-fluoro | Ribo | 5′ and 3′-ends | — | Usually S |
| “Stab 5” | 2′-fluoro | Ribo | — | 1 at 3′-end | Usually AS |
| “Stab 6” | 2′-O-Methyl | Ribo | 5′ and 3′-ends | — | Usually S |
| “Stab 7” | 2′-fluoro | 2′-deoxy | 5′ and 3′-ends | — | Usually S |
| “Stab 8” | 2′-fluoro | 2′-O-Methyl | — | 1 at 3′-end | S or AS |
| “Stab 9” | Ribo | Ribo | 5′ and 3′-ends | — | Usually S |
| “Stab 10” | Ribo | Ribo | — | 1 at 3′-end | Usually AS |
| “Stab 11” | 2′-fluoro | 2′-deoxy | — | 1 at 3′-end | Usually AS |
| Stab 12 | 2′-fluoro | LNA | 5′ and 3′-ends | | Usually S |
| “Stab 13” | 2′-fluoro | LNA | | 1 at 3′-end | Usually AS |
| “Stab 14” | 2′-fluoro | 2′-deoxy | | 2 at 5′-end | Usually AS |
| | | | | 1 at 3′-end | |
| “Stab 15” | 2′-deoxy | 2′-deoxy | | 2 at 5′-end | Usually AS |
| | | | | 1 at 3′-end | |
| “Stab 16 | Ribo | 2′-O-Methyl | 5′ and 3′-ends | | Usually S |
| “Stab 17” | 2′-O-Methyl | 2′-O-Methyl | 5′ and 3′-ends | | Usually S |
| “Stab 18” | 2′-fluoro | 2′-O-Methyl | | 1 at 3′-end | Usually AS |

CAP = any terminal cap, see for example FIG. 10.
All Stab 1-18 chemistries can comprise 3′-terminal thymidine (TT) residues
All Stab 1-18 chemistries typically comprise 21 nucleotides, but can vary as described herein.
S = sense strand
AS = antisense strand

TABLE V
A. 2.5 μmol Synthesis Cycle ABI 394 Instrument

| Reagent | Equivalents | Amount | | Wait Time* DNA | | Wait Time* 2′-O-methyl | | Wait Time*RNA | |
|---|---|---|---|---|---|---|---|---|---|
| Phosphoramidites | 6.5 | 163 | μL | 45 | sec | 2.5 | min | 7.5 | min |
| S-Ethyl Tetrazole | 23.8 | 238 | μL | 45 | sec | 2.5 | min | 7.5 | min |
| Acetic Anhydride | 100 | 233 | μL | 5 | sec | 5 | sec | 5 | sec |
| N-Methyl | 186 | 233 | μL | 5 | sec | 5 | sec | 5 | sec |
| Imidazole | | | | | | | | | |
| TCA | 176 | 2.3 | mL | 21 | sec | 21 | sec | 21 | sec |
| Iodine | 11.2 | 1.7 | mL | 45 | sec | 45 | sec | 45 | sec |
| Beaucage | 12.9 | 645 | μL | 100 | sec | 300 | sec | 300 | sec |

| | | | | | | |
|---|---|---|---|---|---|---|
| Acetonitrile | NA | 6.67 | mL | NA | NA | NA |

B. 0.2 μmol Synthesis Cycle ABI 394 Instrument

| Reagent | Equivalents | Amount | | Wait Time* DNA | | Wait Time* 2′-O-methyl | | Wait Time*RNA | |
|---|---|---|---|---|---|---|---|---|---|
| Phosphoramidites | 15 | 31 | μL | 45 | sec | 233 | sec | 465 | sec |
| S-Ethyl Tetrazole | 38.7 | 31 | μL | 45 | sec | 233 | min | 465 | sec |
| Acetic Anhydride | 655 | 124 | μL | 5 | sec | 5 | sec | 5 | sec |
| N-Methyl | 1245 | 124 | μL | 5 | sec | 5 | sec | 5 | sec |
| Imidazole | | | | | | | | | |
| TCA | 700 | 732 | μL | 10 | sec | 10 | sec | 10 | sec |
| Iodine | 20.6 | 244 | μL | 15 | sec | 15 | sec | 15 | sec |
| Beaucage | 7.7 | 232 | μL | 100 | sec | 300 | sec | 300 | sec |

| | | | | | | |
|---|---|---|---|---|---|---|
| Acetonitrile | NA | 2.64 | mL | NA | NA | NA |

C. 0.2 μmol Synthesis Cycle 96 well Instrument

| | Equivalents: DNA/ | Amount: DNA/2′-O- | | | | Wait Time* 2′-O- | | | |
|---|---|---|---|---|---|---|---|---|---|
| Reagent | 2′-O-methyl/Ribo | methyl/Ribo | | Wait Time* DNA | | methyl | | Wait Time* Ribo | |
| Phosphoramidites | 22/33/66 | 40/60/120 | μL | 60 | sec | 180 | sec | 360 | sec |
| S-Ethyl Tetrazole | 70/105/210 | 40/60/120 | μL | 60 | sec | 180 | min | 360 | sec |
| Acetic Anhydride | 265/265/265 | 50/50/50 | μL | 10 | sec | 10 | sec | 10 | sec |
| N-Methyl | 502/502/502 | 50/50/50 | μL | 10 | sec | 10 | sec | 10 | sec |
| Imidazole | | | | | | | | | |
| TCA | 238/475/475 | 250/500/500 | μL | 15 | sec | 15 | sec | 15 | sec |
| Iodine | 6.8/6.8/6.8 | 80/80/80 | μL | 30 | sec | 30 | sec | 30 | sec |
| Beaucage | 34/51/51 | 80/120/120 | | 100 | sec | 200 | sec | 200 | sec |

| | | | | | | |
|---|---|---|---|---|---|---|
| Acetonitrile | NA | 1150/1150/1150 | μL | NA | NA | NA |

Wait time does not include contact time during delivery.
Tandem synthesis utilizes double coupling of linker molecule

The application's sequence listing, which the Patent Office published only in electronic form, follows.

SEQUENCE LISTING (1715 sequences)

SEQ ID NO: 1 - RNA, 19 nt, Artificial Sequence
  Synthetic
cccucccuccgcccgcccg

SEQ ID NO: 2 - RNA, 19 nt, Artificial Sequence
  Synthetic
gccggcccgcccgucaguc

SEQ ID NO: 3 - RNA, 19 nt, Artificial Sequence
  Synthetic
cuggcaggcaggcaggcaa

SEQ ID NO: 4 - RNA, 19 nt, Artificial Sequence
  Synthetic
aucgguccgaguggcuguc

SEQ ID NO: 5 - RNA, 19 nt, Artificial Sequence
  Synthetic
cggcucuucagcucucccg

SEQ ID NO: 6 - RNA, 19 nt, Artificial Sequence
  Synthetic
gcucggcgucuuccuuccu

SEQ ID NO: 7 - RNA, 19 nt, Artificial Sequence
  Synthetic
uccucccggucagcgucgg

SEQ ID NO: 8 - RNA, 19 nt, Artificial Sequence
  Synthetic
gcggcugcaccggcggcgg

SEQ ID NO: 9 - RNA, 19 nt, Artificial Sequence
  Synthetic
gcgcagucccugcgggagg

SEQ ID NO: 10 - RNA, 19 nt, Artificial Sequence
  Synthetic
gggcgacaagagcugagcg

SEQ ID NO: 11 - RNA, 19 nt, Artificial Sequence
  Synthetic
ggcggccgccgagcgucga

SEQ ID NO: 12 - RNA, 19 nt, Artificial Sequence
  Synthetic
agcucagcgcggcggaggc

SEQ ID NO: 13 - RNA, 19 nt, Artificial Sequence
  Synthetic
cggcggcggcccggcagcc

SEQ ID NO: 14 - RNA, 19 nt, Artificial Sequence
  Synthetic
caacauggcggcggcggcg

SEQ ID NO: 15 - RNA, 19 nt, Artificial Sequence
  Synthetic
ggcggcgggcgcgggcccg

SEQ ID NO: 16 - RNA, 19 nt, Artificial Sequence
  Synthetic
ggagaugguccgcgggcag

SEQ ID NO: 17 - RNA, 19 nt, Artificial Sequence
  Synthetic
gguguucgacguggggccg

SEQ ID NO: 18 - RNA, 19 nt, Artificial Sequence
  Synthetic
gcgcuacaccaaccucucg

SEQ ID NO: 19 - RNA, 19 nt, Artificial Sequence
  Synthetic
guacaucggcgagggcgcc

SEQ ID NO: 20 - RNA, 19 nt, Artificial Sequence
  Synthetic
cuacggcauggugugcucu

SEQ ID NO: 21 - RNA, 19 nt, Artificial Sequence
  Synthetic
ugcuuaugauaaugucaac

SEQ ID NO: 22 - RNA, 19 nt, Artificial Sequence
  Synthetic
caaaguucgaguagcuauc

SEQ ID NO: 23 - RNA, 19 nt, Artificial Sequence
  Synthetic
caagaaaaucagccccuuu

SEQ ID NO: 24 - RNA, 19 nt, Artificial Sequence
  Synthetic
ugagcaccagaccuacugc

SEQ ID NO: 25 - RNA, 19 nt, Artificial Sequence
  Synthetic
ccagagaacccugagggag

SEQ ID NO: 26 - RNA, 19 nt, Artificial Sequence
  Synthetic
gauaaaaaucuuacugcgc

SEQ ID NO: 27 - RNA, 19 nt, Artificial Sequence
  Synthetic
cuucagacaugagaacauc

SEQ ID NO: 28 - RNA, 19 nt, Artificial Sequence
  Synthetic
cauuggaaucaaugacauu

SEQ ID NO: 29 - RNA, 19 nt, Artificial Sequence
  Synthetic
uauucgagcaccaaccauc

SEQ ID NO: 30 - RNA, 19 nt, Artificial Sequence
  Synthetic
cgagcaaaugaaagaugua

SEQ ID NO: 31 - RNA, 19 nt, Artificial Sequence
  Synthetic
auauauaguacaggaccuc

SEQ ID NO: 32 - RNA, 19 nt, Artificial Sequence
  Synthetic
cauggaaacagaucuuuac

SEQ ID NO: 33 - RNA, 19 nt, Artificial Sequence
  Synthetic
caagcucuugaagacacaa

SEQ ID NO: 34 - RNA, 19 nt, Artificial Sequence
  Synthetic
acaccucagcaaugaccau

SEQ ID NO: 35 - RNA, 19 nt, Artificial Sequence
  Synthetic
uaucugcuauuuucucuac

SEQ ID NO: 36 - RNA, 19 nt, Artificial Sequence
  Synthetic
ccagauccucagaggguua

SEQ ID NO: 37 - RNA, 19 nt, Artificial Sequence
  Synthetic
aaaauauauccauucagcu

SEQ ID NO: 38 - RNA, 19 nt, Artificial Sequence
  Synthetic
uaacguucugcaccgugac

SEQ ID NO: 39 - RNA, 19 nt, Artificial Sequence
  Synthetic
ccucaagccuuccaaccug

SEQ ID NO: 40 - RNA, 19 nt, Artificial Sequence
  Synthetic
gcugcucaacaccaccugu

SEQ ID NO: 41 - RNA, 19 nt, Artificial Sequence
  Synthetic
ugaucucaagaucugugac

SEQ ID NO: 42 - RNA, 19 nt, Artificial Sequence
  Synthetic
cuuuggccuggcccguguu

SEQ ID NO: 43 - RNA, 19 nt, Artificial Sequence
  Synthetic
ugcagauccagaccaugau

SEQ ID NO: 44 - RNA, 19 nt, Artificial Sequence
  Synthetic
ucacacaggguuccugaca

SEQ ID NO: 45 - RNA, 19 nt, Artificial Sequence
  Synthetic
agaauauguggccacacgu

SEQ ID NO: 46 - RNA, 19 nt, Artificial Sequence
  Synthetic
uugguacagggcuccagaa

SEQ ID NO: 47 - RNA, 19 nt, Artificial Sequence
  Synthetic
aauuauguugaauuccaag

SEQ ID NO: 48 - RNA, 19 nt, Artificial Sequence
  Synthetic
gggcuacaccaaguccauu

SEQ ID NO: 49 - RNA, 19 nt, Artificial Sequence
  Synthetic
ugauauuuggucuguaggc

SEQ ID NO: 50 - RNA, 19 nt, Artificial Sequence
  Synthetic
cugcauucuggcagaaaug

SEQ ID NO: 51 - RNA, 19 nt, Artificial Sequence
  Synthetic
gcuuucuaacaggcccauc

SEQ ID NO: 52 - RNA, 19 nt, Artificial Sequence
  Synthetic
cuuuccagggaagcauuau

SEQ ID NO: 53 - RNA, 19 nt, Artificial Sequence
  Synthetic
ucuugaccagcugaaacac

SEQ ID NO: 54 - RNA, 19 nt, Artificial Sequence
  Synthetic
cauuuuggguauucuugga

SEQ ID NO: 55 - RNA, 19 nt, Artificial Sequence
  Synthetic
auccccaucacaagaagac

SEQ ID NO: 56 - RNA, 19 nt, Artificial Sequence
  Synthetic
ccugaauuguauaauaaau

SEQ ID NO: 57 - RNA, 19 nt, Artificial Sequence
  Synthetic
uuuaaaagcuaggaacuau

SEQ ID NO: 58 - RNA, 19 nt, Artificial Sequence
  Synthetic
uuugcuuucucuuccacac

SEQ ID NO: 59 - RNA, 19 nt, Artificial Sequence
  Synthetic
caaaaauaaggugccaugg

SEQ ID NO: 60 - RNA, 19 nt, Artificial Sequence
  Synthetic
gaacaggcuguucccaaau

SEQ ID NO: 61 - RNA, 19 nt, Artificial Sequence
  Synthetic
ugcugacuccaaagcucug

SEQ ID NO: 62 - RNA, 19 nt, Artificial Sequence
  Synthetic
ggacuuauuggacaaaaug

SEQ ID NO: 63 - RNA, 19 nt, Artificial Sequence
  Synthetic
guugacauucaacccacac

SEQ ID NO: 64 - RNA, 19 nt, Artificial Sequence
  Synthetic
caagaggauugaaguagaa

SEQ ID NO: 65 - RNA, 19 nt, Artificial Sequence
  Synthetic
acaggcucuggcccaccca

SEQ ID NO: 66 - RNA, 19 nt, Artificial Sequence
  Synthetic
auaucuggagcaguauuac

SEQ ID NO: 67 - RNA, 19 nt, Artificial Sequence
  Synthetic
cgacccgagugacgagccc

SEQ ID NO: 68 - RNA, 19 nt, Artificial Sequence
  Synthetic
caucgccgaagcaccauuc

SEQ ID NO: 69 - RNA, 19 nt, Artificial Sequence
  Synthetic
caaguucgacauggaauug

SEQ ID NO: 70 - RNA, 19 nt, Artificial Sequence
  Synthetic
ggaugacuugccuaaggaa

SEQ ID NO: 71 - RNA, 19 nt, Artificial Sequence
  Synthetic
aaagcucaaagaacuaauu

SEQ ID NO: 72 - RNA, 19 nt, Artificial Sequence
  Synthetic
uuuugaagagacugcuaga

SEQ ID NO: 73 - RNA, 19 nt, Artificial Sequence
  Synthetic
auuccagccaggauacaga

SEQ ID NO: 74 - RNA, 19 nt, Artificial Sequence
  Synthetic
aucuuaaauuugucaggac

SEQ ID NO: 75 - RNA, 19 nt, Artificial Sequence
  Synthetic
caagggcucagaggacugg

SEQ ID NO: 76 - RNA, 19 nt, Artificial Sequence
  Synthetic
gacgugcucagacaucggu

SEQ ID NO: 77 - RNA, 19 nt, Artificial Sequence
  Synthetic
uguucuucuucccaguucu

SEQ ID NO: 78 - RNA, 19 nt, Artificial Sequence
  Synthetic
uugaccccugguccugucu

SEQ ID NO: 79 - RNA, 19 nt, Artificial Sequence
  Synthetic
uccagcccgucuuggcuua

SEQ ID NO: 80 - RNA, 19 nt, Artificial Sequence
  Synthetic
auccacuuugacuccuuug

SEQ ID NO: 81 - RNA, 19 nt, Artificial Sequence
  Synthetic
gagccguuuggaggggcgg

SEQ ID NO: 82 - RNA, 19 nt, Artificial Sequence
  Synthetic
guuucugguaguuguggcu

SEQ ID NO: 83 - RNA, 19 nt, Artificial Sequence
  Synthetic
uuuuaugcuuucaaagaau

SEQ ID NO: 84 - RNA, 19 nt, Artificial Sequence
  Synthetic
uuucuucaguccagagaau

SEQ ID NO: 85 - RNA, 19 nt, Artificial Sequence
  Synthetic
uuccuccuggcagcccugu

SEQ ID NO: 86 - RNA, 19 nt, Artificial Sequence
  Synthetic
ugugugucacccauuggug

SEQ ID NO: 87 - RNA, 19 nt, Artificial Sequence
  Synthetic
gaccugcggcaguauguac

SEQ ID NO: 88 - RNA, 19 nt, Artificial Sequence
  Synthetic
cuucagugcaccuuacugc

SEQ ID NO: 89 - RNA, 19 nt, Artificial Sequence
  Synthetic
cuuacuguugcuuuaguca

SEQ ID NO: 90 - RNA, 19 nt, Artificial Sequence
  Synthetic
acuaauugcuuucugguuu

SEQ ID NO: 91 - RNA, 19 nt, Artificial Sequence
  Synthetic
ugaaagaugcagugguucc

SEQ ID NO: 92 - RNA, 19 nt, Artificial Sequence
  Synthetic
cucccucuccugaauccuu

SEQ ID NO: 93 - RNA, 19 nt, Artificial Sequence
  Synthetic
uuucuacaugaugcccugc

SEQ ID NO: 94 - RNA, 19 nt, Artificial Sequence
  Synthetic
cugaccaugcagccgcacc

SEQ ID NO: 95 - RNA, 19 nt, Artificial Sequence
  Synthetic
cagagagagauucuucccc

SEQ ID NO: 96 - RNA, 19 nt, Artificial Sequence
  Synthetic
caauuggcucuagucacug

SEQ ID NO: 97 - RNA, 19 nt, Artificial Sequence
  Synthetic
ggcaucucacuuuaugaua

SEQ ID NO: 98 - RNA, 19 nt, Artificial Sequence
  Synthetic
agggaaggcuacuaccuag

SEQ ID NO: 99 - RNA, 19 nt, Artificial Sequence
  Synthetic
gggcacuuuaagucaguga

SEQ ID NO: 100 - RNA, 19 nt, Artificial Sequence
  Synthetic
acagccccuuauuugcacu

SEQ ID NO: 101 - RNA, 19 nt, Artificial Sequence
  Synthetic
uucaccuuuugaccauaac

SEQ ID NO: 102 - RNA, 19 nt, Artificial Sequence
  Synthetic
cuguuuccccagagcagga

SEQ ID NO: 103 - RNA, 19 nt, Artificial Sequence
  Synthetic
agcuuguggaaauaccuug

SEQ ID NO: 104 - RNA, 19 nt, Artificial Sequence
  Synthetic
ggcugauguugcagccugc

SEQ ID NO: 105 - RNA, 19 nt, Artificial Sequence
  Synthetic
cagcaagugcuuccgucuc

SEQ ID NO: 106 - RNA, 19 nt, Artificial Sequence
  Synthetic
ccggaauccuuggggagca

SEQ ID NO: 107 - RNA, 19 nt, Artificial Sequence
  Synthetic
acuuguccacgucuuuucu

SEQ ID NO: 108 - RNA, 19 nt, Artificial Sequence
  Synthetic
ucauaucaugguagucacu

SEQ ID NO: 109 - RNA, 19 nt, Artificial Sequence
  Synthetic
uaacauauauaagguaugu

SEQ ID NO: 110 - RNA, 19 nt, Artificial Sequence
  Synthetic
ugcuauuggcccagcuuuu

SEQ ID NO: 111 - RNA, 19 nt, Artificial Sequence
  Synthetic
uagaaaaugcagucauuuu

SEQ ID NO: 112 - RNA, 19 nt, Artificial Sequence
  Synthetic
uucuaaauaaaaaggaagu

SEQ ID NO: 113 - RNA, 19 nt, Artificial Sequence
  Synthetic
uacugcacccagcaguguc

SEQ ID NO: 114 - RNA, 19 nt, Artificial Sequence
  Synthetic
cacucuguaguuacugugg

SEQ ID NO: 115 - RNA, 19 nt, Artificial Sequence
  Synthetic
gucacuuguaccauauaga

SEQ ID NO: 116 - RNA, 19 nt, Artificial Sequence
  Synthetic
agguguaacacuugucaag

SEQ ID NO: 117 - RNA, 19 nt, Artificial Sequence
  Synthetic
gaagcguuaugugcaguac

SEQ ID NO: 118 - RNA, 19 nt, Artificial Sequence
  Synthetic
cuuaauguuuguaagacuu

SEQ ID NO: 119 - RNA, 19 nt, Artificial Sequence
  Synthetic
uacaaaaaaagauuuaaag

SEQ ID NO: 120 - RNA, 19 nt, Artificial Sequence
  Synthetic
guggcagcuucacucgaca

SEQ ID NO: 121 - RNA, 19 nt, Artificial Sequence
  Synthetic
auuuggugagagaaguaca

SEQ ID NO: 122 - RNA, 19 nt, Artificial Sequence
  Synthetic
aaagguugcagugcugagc

SEQ ID NO: 123 - RNA, 19 nt, Artificial Sequence
  Synthetic
cugugggcgguuucugggg

SEQ ID NO: 124 - RNA, 19 nt, Artificial Sequence
  Synthetic
gaugucccaggguggaacu

SEQ ID NO: 125 - RNA, 19 nt, Artificial Sequence
  Synthetic
uccacaugcuggugcauau

SEQ ID NO: 126 - RNA, 19 nt, Artificial Sequence
  Synthetic
uacgcccuugagcuacuuc

SEQ ID NO: 127 - RNA, 19 nt, Artificial Sequence
  Synthetic
caaaugugguuuauaccuc

SEQ ID NO: 128 - RNA, 19 nt, Artificial Sequence
  Synthetic
cgcagauacaagaaucuuu

SEQ ID NO: 129 - RNA, 19 nt, Artificial Sequence
  Synthetic
uaugaauauacaauucuuu

SEQ ID NO: 130 - RNA, 19 nt, Artificial Sequence
  Synthetic
uuuccuucuacagcuuagc

SEQ ID NO: 131 - RNA, 19 nt, Artificial Sequence
  Synthetic
cuccgucuuuucaaccacg

SEQ ID NO: 132 - RNA, 19 nt, Artificial Sequence
  Synthetic
gaacauuuaaaacccgacc

SEQ ID NO: 133 - RNA, 19 nt, Artificial Sequence
  Synthetic
cuacuagcacuguucuguc

SEQ ID NO: 134 - RNA, 19 nt, Artificial Sequence
  Synthetic
ccucaaguacucaaauauu

SEQ ID NO: 135 - RNA, 19 nt, Artificial Sequence
  Synthetic
uucugauacugcugaguca

SEQ ID NO: 136 - RNA, 19 nt, Artificial Sequence
  Synthetic
agacugucagaaaaagcua

SEQ ID NO: 137 - RNA, 19 nt, Artificial Sequence
  Synthetic
agcacuaacucguguuugg

SEQ ID NO: 138 - RNA, 19 nt, Artificial Sequence
  Synthetic
gagcucuauccauauuuua

SEQ ID NO: 139 - RNA, 19 nt, Artificial Sequence
  Synthetic
acugaucucuuuaaguauu

SEQ ID NO: 140 - RNA, 19 nt, Artificial Sequence
  Synthetic
uuguuccugccacugugua

SEQ ID NO: 141 - RNA, 19 nt, Artificial Sequence
  Synthetic
acuguggaguugacucggu

SEQ ID NO: 142 - RNA, 19 nt, Artificial Sequence
  Synthetic
uguucugucccagugcggu

SEQ ID NO: 143 - RNA, 19 nt, Artificial Sequence
  Synthetic
ugccuccucuugacuuccc

SEQ ID NO: 144 - RNA, 19 nt, Artificial Sequence
  Synthetic
ccacugcucucugugguga

SEQ ID NO: 145 - RNA, 19 nt, Artificial Sequence
  Synthetic
agaaauuugccuuguucaa

SEQ ID NO: 146 - RNA, 19 nt, Artificial Sequence
  Synthetic
auaauuacuguacccucgc

SEQ ID NO: 147 - RNA, 19 nt, Artificial Sequence
  Synthetic
caugacuguuacagcuuuc

SEQ ID NO: 148 - RNA, 19 nt, Artificial Sequence
  Synthetic
cugugcagagaugacuguc

SEQ ID NO: 149 - RNA, 19 nt, Artificial Sequence
  Synthetic
ccaagugccacaugccuac

SEQ ID NO: 150 - RNA, 19 nt, Artificial Sequence
  Synthetic
cgauugaaaugaaaacucu

SEQ ID NO: 151 - RNA, 19 nt, Artificial Sequence
  Synthetic
uauuguuaccucugaguug

SEQ ID NO: 152 - RNA, 19 nt, Artificial Sequence
  Synthetic
guguuccacggaaaaugcu

SEQ ID NO: 153 - RNA, 19 nt, Artificial Sequence
  Synthetic
uauccagcagaucauuuag

SEQ ID NO: 154 - RNA, 19 nt, Artificial Sequence
  Synthetic
ggaaaaauaauucuauuuu

SEQ ID NO: 155 - RNA, 19 nt, Artificial Sequence
  Synthetic
uuagcuuuucauuucucag

SEQ ID NO: 156 - RNA, 19 nt, Artificial Sequence
  Synthetic
gcuguccuuuuuucuuguu

SEQ ID NO: 157 - RNA, 19 nt, Artificial Sequence
  Synthetic
uugauuuuugacagcaaug

SEQ ID NO: 158 - RNA, 19 nt, Artificial Sequence
  Synthetic
ggagaauggguuauauaaa

SEQ ID NO: 159 - RNA, 19 nt, Artificial Sequence
  Synthetic
agacugccugcuaauauga

SEQ ID NO: 160 - RNA, 19 nt, Artificial Sequence
  Synthetic
aacagaaaugcauuuguaa

SEQ ID NO: 161 - RNA, 19 nt, Artificial Sequence
  Synthetic
auucaugaaaauaaaugua

SEQ ID NO: 162 - RNA, 19 nt, Artificial Sequence
  Synthetic
acaucuucuaucuucaaaa

SEQ ID NO: 163 - RNA, 19 nt, Artificial Sequence
  Synthetic
uucaaaaaaaaaaaaaaaa

SEQ ID NO: 164 - RNA, 19 nt, Artificial Sequence
  Synthetic
cgggcgggcggagggaggg

SEQ ID NO: 165 - RNA, 19 nt, Artificial Sequence
  Synthetic
gacugacgggcgggccggc

SEQ ID NO: 166 - RNA, 19 nt, Artificial Sequence
  Synthetic
uugccugccugccugccag

SEQ ID NO: 167 - RNA, 19 nt, Artificial Sequence
  Synthetic
gacagccacucggaccgau

SEQ ID NO: 168 - RNA, 19 nt, Artificial Sequence
  Synthetic
cgggagagcugaagagccg

SEQ ID NO: 169 - RNA, 19 nt, Artificial Sequence
  Synthetic
aggaaggaagacgccgagc

SEQ ID NO: 170 - RNA, 19 nt, Artificial Sequence
  Synthetic
ccgacgcugaccgggagga

SEQ ID NO: 171 - RNA, 19 nt, Artificial Sequence
  Synthetic
ccgccgccggugcagccgc

SEQ ID NO: 172 - RNA, 19 nt, Artificial Sequence
  Synthetic
ccucccgcagggacugcgc

SEQ ID NO: 173 - RNA, 19 nt, Artificial Sequence
  Synthetic
cgcucagcucuugucgccc

SEQ ID NO: 174 - RNA, 19 nt, Artificial Sequence
  Synthetic
ucgacgcucggcggccgcc

SEQ ID NO: 175 - RNA, 19 nt, Artificial Sequence
  Synthetic
gccuccgccgcgcugagcu

SEQ ID NO: 176 - RNA, 19 nt, Artificial Sequence
  Synthetic
ggcugccgggccgccgccg

SEQ ID NO: 177 - RNA, 19 nt, Artificial Sequence
  Synthetic
cgccgccgccgccauguug

SEQ ID NO: 178 - RNA, 19 nt, Artificial Sequence
  Synthetic
cgggcccgcgcccgccgcc

SEQ ID NO: 179 - RNA, 19 nt, Artificial Sequence
  Synthetic
cugcccgcggaccaucucc

SEQ ID NO: 180 - RNA, 19 nt, Artificial Sequence
  Synthetic
cggccccacgucgaacacc

SEQ ID NO: 181 - RNA, 19 nt, Artificial Sequence
  Synthetic
cgagagguugguguagcgc

SEQ ID NO: 182 - RNA, 19 nt, Artificial Sequence
  Synthetic
ggcgcccucgccgauguac

SEQ ID NO: 183 - RNA, 19 nt, Artificial Sequence
  Synthetic
agagcacaccaugccguag

SEQ ID NO: 184 - RNA, 19 nt, Artificial Sequence
  Synthetic
guugacauuaucauaagca

SEQ ID NO: 185 - RNA, 19 nt, Artificial Sequence
  Synthetic
gauagcuacucgaacuuug

SEQ ID NO: 186 - RNA, 19 nt, Artificial Sequence
  Synthetic
aaaggggcugauuuucuug

SEQ ID NO: 187 - RNA, 19 nt, Artificial Sequence
  Synthetic
gcaguaggucuggugcuca

SEQ ID NO: 188 - RNA, 19 nt, Artificial Sequence
  Synthetic
cucccucaggguucucugg

SEQ ID NO: 189 - RNA, 19 nt, Artificial Sequence
  Synthetic
gcgcaguaagauuuuuauc

SEQ ID NO: 190 - RNA, 19 nt, Artificial Sequence
  Synthetic
gauguucucaugucugaag

SEQ ID NO: 191 - RNA, 19 nt, Artificial Sequence
  Synthetic
aaugucauugauuccaaug

SEQ ID NO: 192 - RNA, 19 nt, Artificial Sequence
  Synthetic
gaugguuggugcucgaaua

SEQ ID NO: 193 - RNA, 19 nt, Artificial Sequence
  Synthetic
uacaucuuucauuugcucg

SEQ ID NO: 194 - RNA, 19 nt, Artificial Sequence
  Synthetic
gagguccuguacuauauau

SEQ ID NO: 195 - RNA, 19 nt, Artificial Sequence
  Synthetic
guaaagaucuguuuccaug

SEQ ID NO: 196 - RNA, 19 nt, Artificial Sequence
  Synthetic
uugugucuucaagagcuug

SEQ ID NO: 197 - RNA, 19 nt, Artificial Sequence
  Synthetic
auggucauugcugaggugu

SEQ ID NO: 198 - RNA, 19 nt, Artificial Sequence
  Synthetic
guagagaaaauagcagaua

SEQ ID NO: 199 - RNA, 19 nt, Artificial Sequence
  Synthetic
uaacccucugaggaucugg

SEQ ID NO: 200 - RNA, 19 nt, Artificial Sequence
  Synthetic
agcugaauggauauauuuu

SEQ ID NO: 201 - RNA, 19 nt, Artificial Sequence
  Synthetic
gucacggugcagaacguua

SEQ ID NO: 202 - RNA, 19 nt, Artificial Sequence
  Synthetic
cagguuggaaggcuugagg

SEQ ID NO: 203 - RNA, 19 nt, Artificial Sequence
  Synthetic
acaggugguguugagcagc

SEQ ID NO: 204 - RNA, 19 nt, Artificial Sequence
  Synthetic
gucacagaucuugagauca

SEQ ID NO: 205 - RNA, 19 nt, Artificial Sequence
  Synthetic
aacacgggccaggccaaag

SEQ ID NO: 206 - RNA, 19 nt, Artificial Sequence
  Synthetic
aucauggucuggaucugca

SEQ ID NO: 207 - RNA, 19 nt, Artificial Sequence
  Synthetic
ugucaggaacccuguguga

SEQ ID NO: 208 - RNA, 19 nt, Artificial Sequence
  Synthetic
acguguggccacauauucu

SEQ ID NO: 209 - RNA, 19 nt, Artificial Sequence
  Synthetic
uucuggagcccuguaccaa

SEQ ID NO: 210 - RNA, 19 nt, Artificial Sequence
  Synthetic
cuuggaauucaacauaauu

SEQ ID NO: 211 - RNA, 19 nt, Artificial Sequence
  Synthetic
aauggacuugguguagccc

SEQ ID NO: 212 - RNA, 19 nt, Artificial Sequence
  Synthetic
gccuacagaccaaauauca

SEQ ID NO: 213 - RNA, 19 nt, Artificial Sequence
  Synthetic
cauuucugccagaaugcag

SEQ ID NO: 214 - RNA, 19 nt, Artificial Sequence
  Synthetic
gaugggccuguuagaaagc

SEQ ID NO: 215 - RNA, 19 nt, Artificial Sequence
  Synthetic
auaaugcuucccuggaaag

SEQ ID NO: 216 - RNA, 19 nt, Artificial Sequence
  Synthetic
guguuucagcuggucaaga

SEQ ID NO: 217 - RNA, 19 nt, Artificial Sequence
  Synthetic
uccaagaauacccaaaaug

SEQ ID NO: 218 - RNA, 19 nt, Artificial Sequence
  Synthetic
gucuucuugugauggggau

SEQ ID NO: 219 - RNA, 19 nt, Artificial Sequence
  Synthetic
auuuauuauacaauucagg

SEQ ID NO: 220 - RNA, 19 nt, Artificial Sequence
  Synthetic
auaguuccuagcuuuuaaa

SEQ ID NO: 221 - RNA, 19 nt, Artificial Sequence
  Synthetic
guguggaagagaaagcaaa

SEQ ID NO: 222 - RNA, 19 nt, Artificial Sequence
  Synthetic
ccauggcaccuuauuuuug

SEQ ID NO: 223 - RNA, 19 nt, Artificial Sequence
  Synthetic
auuugggaacagccuguuc

SEQ ID NO: 224 - RNA, 19 nt, Artificial Sequence
  Synthetic
cagagcuuuggagucagca

SEQ ID NO: 225 - RNA, 19 nt, Artificial Sequence
  Synthetic
cauuuuguccaauaagucc

SEQ ID NO: 226 - RNA, 19 nt, Artificial Sequence
  Synthetic
guguggguugaaugucaac

SEQ ID NO: 227 - RNA, 19 nt, Artificial Sequence
  Synthetic
uucuacuucaauccucuug

SEQ ID NO: 228 - RNA, 19 nt, Artificial Sequence
  Synthetic
ugggugggccagagccugu

SEQ ID NO: 229 - RNA, 19 nt, Artificial Sequence
  Synthetic
guaauacugcuccagauau

SEQ ID NO: 230 - RNA, 19 nt, Artificial Sequence
  Synthetic
gggcucgucacucgggucg

SEQ ID NO: 231 - RNA, 19 nt, Artificial Sequence
  Synthetic
gaauggugcuucggcgaug

SEQ ID NO: 232 - RNA, 19 nt, Artificial Sequence
  Synthetic
caauuccaugucgaacuug

SEQ ID NO: 233 - RNA, 19 nt, Artificial Sequence
  Synthetic
uuccuuaggcaagucaucc

SEQ ID NO: 234 - RNA, 19 nt, Artificial Sequence
  Synthetic
aauuaguucuuugagcuuu

SEQ ID NO: 235 - RNA, 19 nt, Artificial Sequence
  Synthetic
ucuagcagucucuucaaaa

SEQ ID NO: 236 - RNA, 19 nt, Artificial Sequence
  Synthetic
ucuguauccuggcuggaau

SEQ ID NO: 237 - RNA, 19 nt, Artificial Sequence
  Synthetic
guccugacaaauuuaagau

SEQ ID NO: 238 - RNA, 19 nt, Artificial Sequence
  Synthetic
ccaguccucugagcccuug

SEQ ID NO: 239 - RNA, 19 nt, Artificial Sequence
  Synthetic
accgaugucugagcacguc

SEQ ID NO: 240 - RNA, 19 nt, Artificial Sequence
  Synthetic
agaacugggaagaagaaca

SEQ ID NO: 241 - RNA, 19 nt, Artificial Sequence
  Synthetic
agacaggaccaggggucaa

SEQ ID NO: 242 - RNA, 19 nt, Artificial Sequence
  Synthetic
uaagccaagacgggcugga

SEQ ID NO: 243 - RNA, 19 nt, Artificial Sequence
  Synthetic
caaaggagucaaaguggau

SEQ ID NO: 244 - RNA, 19 nt, Artificial Sequence
  Synthetic
ccgccccuccaaacggcuc

SEQ ID NO: 245 - RNA, 19 nt, Artificial Sequence
  Synthetic
agccacaacuaccagaaac

SEQ ID NO: 246 - RNA, 19 nt, Artificial Sequence
  Synthetic
auucuuugaaagcauaaaa

SEQ ID NO: 247 - RNA, 19 nt, Artificial Sequence
  Synthetic
auucucuggacugaagaaa

SEQ ID NO: 248 - RNA, 19 nt, Artificial Sequence
  Synthetic
acagggcugccaggaggaa

SEQ ID NO: 249 - RNA, 19 nt, Artificial Sequence
  Synthetic
caccaaugggugacacaca

SEQ ID NO: 250 - RNA, 19 nt, Artificial Sequence
  Synthetic
guacauacugccgcagguc

SEQ ID NO: 251 - RNA, 19 nt, Artificial Sequence
  Synthetic
gcaguaaggugcacugaag

SEQ ID NO: 252 - RNA, 19 nt, Artificial Sequence
  Synthetic
ugacuaaagcaacaguaag

SEQ ID NO: 253 - RNA, 19 nt, Artificial Sequence
  Synthetic
aaaccagaaagcaauuagu

SEQ ID NO: 254 - RNA, 19 nt, Artificial Sequence
  Synthetic
ggaaccacugcaucuuuca

SEQ ID NO: 255 - RNA, 19 nt, Artificial Sequence
  Synthetic
aaggauucaggagagggag

SEQ ID NO: 256 - RNA, 19 nt, Artificial Sequence
  Synthetic
gcagggcaucauguagaaa

SEQ ID NO: 257 - RNA, 19 nt, Artificial Sequence
  Synthetic
ggugcggcugcauggucag

SEQ ID NO: 258 - RNA, 19 nt, Artificial Sequence
  Synthetic
ggggaagaaucucucucug

SEQ ID NO: 259 - RNA, 19 nt, Artificial Sequence
  Synthetic
cagugacuagagccaauug

SEQ ID NO: 260 - RNA, 19 nt, Artificial Sequence
  Synthetic
uaucauaaagugagaugcc

SEQ ID NO: 261 - RNA, 19 nt, Artificial Sequence
  Synthetic
cuagguaguagccuucccu

SEQ ID NO: 262 - RNA, 19 nt, Artificial Sequence
  Synthetic
ucacugacuuaaagugccc

SEQ ID NO: 263 - RNA, 19 nt, Artificial Sequence
  Synthetic
agugcaaauaaggggcugu

SEQ ID NO: 264 - RNA, 19 nt, Artificial Sequence
  Synthetic
guuauggucaaaaggugaa

SEQ ID NO: 265 - RNA, 19 nt, Artificial Sequence
  Synthetic
uccugcucuggggaaacag

SEQ ID NO: 266 - RNA, 19 nt, Artificial Sequence
  Synthetic
caagguauuuccacaagcu

SEQ ID NO: 267 - RNA, 19 nt, Artificial Sequence
  Synthetic
gcaggcugcaacaucagcc

SEQ ID NO: 268 - RNA, 19 nt, Artificial Sequence
  Synthetic
gagacggaagcacuugcug

SEQ ID NO: 269 - RNA, 19 nt, Artificial Sequence
  Synthetic
ugcuccccaaggauuccgg

SEQ ID NO: 270 - RNA, 19 nt, Artificial Sequence
  Synthetic
agaaaagacguggacaagu

SEQ ID NO: 271 - RNA, 19 nt, Artificial Sequence
  Synthetic
agugacuaccaugauauga

SEQ ID NO: 272 - RNA, 19 nt, Artificial Sequence
  Synthetic
acauaccuuauauauguua

SEQ ID NO: 273 - RNA, 19 nt, Artificial Sequence
  Synthetic
aaaagcugggccaauagca

SEQ ID NO: 274 - RNA, 19 nt, Artificial Sequence
  Synthetic
aaaaugacugcauuuucua

SEQ ID NO: 275 - RNA, 19 nt, Artificial Sequence
  Synthetic
acuuccuuuuuauuuagaa

SEQ ID NO: 276 - RNA, 19 nt, Artificial Sequence
  Synthetic
gacacugcugggugcagua

SEQ ID NO: 277 - RNA, 19 nt, Artificial Sequence
  Synthetic
ccacaguaacuacagagug

SEQ ID NO: 278 - RNA, 19 nt, Artificial Sequence
  Synthetic
ucuauaugguacaagugac

SEQ ID NO: 279 - RNA, 19 nt, Artificial Sequence
  Synthetic
cuugacaaguguuacaccu

SEQ ID NO: 280 - RNA, 19 nt, Artificial Sequence
  Synthetic
guacugcacauaacgcuuc

SEQ ID NO: 281 - RNA, 19 nt, Artificial Sequence
  Synthetic
aagucuuacaaacauuaag

SEQ ID NO: 282 - RNA, 19 nt, Artificial Sequence
  Synthetic
cuuuaaaucuuuuuuugua

SEQ ID NO: 283 - RNA, 19 nt, Artificial Sequence
  Synthetic
ugucgagugaagcugccac

SEQ ID NO: 284 - RNA, 19 nt, Artificial Sequence
  Synthetic
uguacuucucucaccaaau

SEQ ID NO: 285 - RNA, 19 nt, Artificial Sequence
  Synthetic
gcucagcacugcaaccuuu

SEQ ID NO: 286 - RNA, 19 nt, Artificial Sequence
  Synthetic
ccccagaaaccgcccacag

SEQ ID NO: 287 - RNA, 19 nt, Artificial Sequence
  Synthetic
aguuccacccugggacauc

SEQ ID NO: 288 - RNA, 19 nt, Artificial Sequence
  Synthetic
auaugcaccagcaugugga

SEQ ID NO: 289 - RNA, 19 nt, Artificial Sequence
  Synthetic
gaaguagcucaagggcgua

SEQ ID NO: 290 - RNA, 19 nt, Artificial Sequence
  Synthetic
gagguauaaaccacauuug

SEQ ID NO: 291 - RNA, 19 nt, Artificial Sequence
  Synthetic
aaagauucuuguaucugcg

SEQ ID NO: 292 - RNA, 19 nt, Artificial Sequence
  Synthetic
aaagaauuguauauucaua

SEQ ID NO: 293 - RNA, 19 nt, Artificial Sequence
  Synthetic
gcuaagcuguagaaggaaa

SEQ ID NO: 294 - RNA, 19 nt, Artificial Sequence
  Synthetic
cgugguugaaaagacggag

SEQ ID NO: 295 - RNA, 19 nt, Artificial Sequence
  Synthetic
ggucggguuuuaaauguuc

SEQ ID NO: 296 - RNA, 19 nt, Artificial Sequence
  Synthetic
gacagaacagugcuaguag

SEQ ID NO: 297 - RNA, 19 nt, Artificial Sequence
  Synthetic
aauauuugaguacuugagg

SEQ ID NO: 298 - RNA, 19 nt, Artificial Sequence
  Synthetic
ugacucagcaguaucagaa

SEQ ID NO: 299 - RNA, 19 nt, Artificial Sequence
  Synthetic
uagcuuuuucugacagucu

SEQ ID NO: 300 - RNA, 19 nt, Artificial Sequence
  Synthetic
ccaaacacgaguuagugcu

SEQ ID NO: 301 - RNA, 19 nt, Artificial Sequence
  Synthetic
uaaaauauggauagagcuc

SEQ ID NO: 302 - RNA, 19 nt, Artificial Sequence
  Synthetic
aauacuuaaagagaucagu

SEQ ID NO: 303 - RNA, 19 nt, Artificial Sequence
  Synthetic
uacacaguggcaggaacaa

SEQ ID NO: 304 - RNA, 19 nt, Artificial Sequence
  Synthetic
accgagucaacuccacagu

SEQ ID NO: 305 - RNA, 19 nt, Artificial Sequence
  Synthetic
accgcacugggacagaaca

SEQ ID NO: 306 - RNA, 19 nt, Artificial Sequence
  Synthetic
gggaagucaagaggaggca

SEQ ID NO: 307 - RNA, 19 nt, Artificial Sequence
  Synthetic
ucaccacagagagcagugg

SEQ ID NO: 308 - RNA, 19 nt, Artificial Sequence
  Synthetic
uugaacaaggcaaauuucu

SEQ ID NO: 309 - RNA, 19 nt, Artificial Sequence
  Synthetic
gcgaggguacaguaauuau

SEQ ID NO: 310 - RNA, 19 nt, Artificial Sequence
  Synthetic
gaaagcuguaacagucaug

SEQ ID NO: 311 - RNA, 19 nt, Artificial Sequence
  Synthetic
gacagucaucucugcacag

SEQ ID NO: 312 - RNA, 19 nt, Artificial Sequence
  Synthetic
guaggcauguggcacuugg

SEQ ID NO: 313 - RNA, 19 nt, Artificial Sequence
  Synthetic
agaguuuucauuucaaucg

SEQ ID NO: 314 - RNA, 19 nt, Artificial Sequence
  Synthetic
caacucagagguaacaaua

SEQ ID NO: 315 - RNA, 19 nt, Artificial Sequence
  Synthetic
agcauuuuccguggaacac

SEQ ID NO: 316 - RNA, 19 nt, Artificial Sequence
  Synthetic
cuaaaugaucugcuggaua

SEQ ID NO: 317 - RNA, 19 nt, Artificial Sequence
  Synthetic
aaaauagaauuauuuuucc

SEQ ID NO: 318 - RNA, 19 nt, Artificial Sequence
  Synthetic
cugagaaaugaaaagcuaa

SEQ ID NO: 319 - RNA, 19 nt, Artificial Sequence
  Synthetic
aacaagaaaaaaggacagc

SEQ ID NO: 320 - RNA, 19 nt, Artificial Sequence
  Synthetic
cauugcugucaaaaaucaa

SEQ ID NO: 321 - RNA, 19 nt, Artificial Sequence
  Synthetic
uuuauauaacccauucucc

SEQ ID NO: 322 - RNA, 19 nt, Artificial Sequence
  Synthetic
ucauauuagcaggcagucu

SEQ ID NO: 323 - RNA, 19 nt, Artificial Sequence
  Synthetic
uuacaaaugcauuucuguu

SEQ ID NO: 324 - RNA, 19 nt, Artificial Sequence
  Synthetic
uacauuuauuuucaugaau

SEQ ID NO: 325 - RNA, 19 nt, Artificial Sequence
  Synthetic
uuuugaagauagaagaugu

SEQ ID NO: 326 - RNA, 19 nt, Artificial Sequence
  Synthetic
uuuuuuuuuuuuuuuugaa

SEQ ID NO: 327 - RNA, 19 nt, Artificial Sequence
  Synthetic
cggggccucgggcggggcc

SEQ ID NO: 328 - RNA, 19 nt, Artificial Sequence
  Synthetic
cgccguggggaggagggcg

SEQ ID NO: 329 - RNA, 19 nt, Artificial Sequence
  Synthetic
ggugggaggggaggagugg

SEQ ID NO: 330 - RNA, 19 nt, Artificial Sequence
  Synthetic
gagauggcggcggcggcgg

SEQ ID NO: 331 - RNA, 19 nt, Artificial Sequence
  Synthetic
gcucaggggggcgggggcg

SEQ ID NO: 332 - RNA, 19 nt, Artificial Sequence
  Synthetic
ggggagccccguagaaccg

SEQ ID NO: 333 - RNA, 19 nt, Artificial Sequence
  Synthetic
gagggggucggcccggggg

SEQ ID NO: 334 - RNA, 19 nt, Artificial Sequence
  Synthetic
gucccgggggagguggaga

SEQ ID NO: 335 - RNA, 19 nt, Artificial Sequence
  Synthetic
auggugaaggggcagccgu

SEQ ID NO: 336 - RNA, 19 nt, Artificial Sequence
  Synthetic
uucgacgugggcccgcgcu

SEQ ID NO: 337 - RNA, 19 nt, Artificial Sequence
  Synthetic
uacacgcaguugcaguaca

SEQ ID NO: 338 - RNA, 19 nt, Artificial Sequence
  Synthetic
aucggcgagggcgcguacg

SEQ ID NO: 339 - RNA, 19 nt, Artificial Sequence
  Synthetic
ggcauggucagcucggccu

SEQ ID NO: 340 - RNA, 19 nt, Artificial Sequence
  Synthetic
uaugaccacgugcgcaaga

SEQ ID NO: 341 - RNA, 19 nt, Artificial Sequence
  Synthetic
acucgcguggccaucaaga

SEQ ID NO: 342 - RNA, 19 nt, Artificial Sequence
  Synthetic
aagaucagccccuucgaac

SEQ ID NO: 343 - RNA, 19 nt, Artificial Sequence
  Synthetic
caucagaccuacugccagc

SEQ ID NO: 344 - RNA, 19 nt, Artificial Sequence
  Synthetic
cgcacgcuccgggagaucc

SEQ ID NO: 345 - RNA, 19 nt, Artificial Sequence
  Synthetic
cagauccugcugcgcuucc

SEQ ID NO: 346 - RNA, 19 nt, Artificial Sequence
  Synthetic
cgccaugagaaugucaucg

SEQ ID NO: 347 - RNA, 19 nt, Artificial Sequence
  Synthetic
ggcauccgagacauucugc

SEQ ID NO: 348 - RNA, 19 nt, Artificial Sequence
  Synthetic
cgggcguccacccuggaag

SEQ ID NO: 349 - RNA, 19 nt, Artificial Sequence
  Synthetic
gccaugagagaugucuaca

SEQ ID NO: 350 - RNA, 19 nt, Artificial Sequence
  Synthetic
auugugcaggaccugaugg

SEQ ID NO: 351 - RNA, 19 nt, Artificial Sequence
  Synthetic
gagacugaccuguacaagu

SEQ ID NO: 352 - RNA, 19 nt, Artificial Sequence
  Synthetic
uugcugaaaagccagcagc

SEQ ID NO: 353 - RNA, 19 nt, Artificial Sequence
  Synthetic
cugagcaaugaccauaucu

SEQ ID NO: 354 - RNA, 19 nt, Artificial Sequence
  Synthetic
ugcuacuuccucuaccaga

SEQ ID NO: 355 - RNA, 19 nt, Artificial Sequence
  Synthetic
auccugcggggccucaagu

SEQ ID NO: 356 - RNA, 19 nt, Artificial Sequence
  Synthetic
uacauccacuccgccaacg

SEQ ID NO: 357 - RNA, 19 nt, Artificial Sequence
  Synthetic
gugcuccaccgagaucuaa

SEQ ID NO: 358 - RNA, 19 nt, Artificial Sequence
  Synthetic
aagcccuccaaccugcuca

SEQ ID NO: 359 - RNA, 19 nt, Artificial Sequence
  Synthetic
aucaacaccaccugcgacc

SEQ ID NO: 360 - RNA, 19 nt, Artificial Sequence
  Synthetic
cuuaagauuugugauuucg

SEQ ID NO: 361 - RNA, 19 nt, Artificial Sequence
  Synthetic
ggccuggcccggauugccg

SEQ ID NO: 362 - RNA, 19 nt, Artificial Sequence
  Synthetic
gauccugagcaugaccaca

SEQ ID NO: 363 - RNA, 19 nt, Artificial Sequence
  Synthetic
accggcuuccugacggagu

SEQ ID NO: 364 - RNA, 19 nt, Artificial Sequence
  Synthetic
uauguggcuacgcgcuggu

SEQ ID NO: 365 - RNA, 19 nt, Artificial Sequence
  Synthetic
uaccgggccccagagauca

SEQ ID NO: 366 - RNA, 19 nt, Artificial Sequence
  Synthetic
augcugaacuccaagggcu

SEQ ID NO: 367 - RNA, 19 nt, Artificial Sequence
  Synthetic
uauaccaaguccaucgaca

SEQ ID NO: 368 - RNA, 19 nt, Artificial Sequence
  Synthetic
aucuggucugugggcugca

SEQ ID NO: 369 - RNA, 19 nt, Artificial Sequence
  Synthetic
auucuggcugagaugcucu

SEQ ID NO: 370 - RNA, 19 nt, Artificial Sequence
  Synthetic
ucuaaccggcccaucuucc

SEQ ID NO: 371 - RNA, 19 nt, Artificial Sequence
  Synthetic
ccuggcaagcacuaccugg

SEQ ID NO: 372 - RNA, 19 nt, Artificial Sequence
  Synthetic
gaucagcucaaccacauuc

SEQ ID NO: 373 - RNA, 19 nt, Artificial Sequence
  Synthetic
cugggcauccugggcuccc

SEQ ID NO: 374 - RNA, 19 nt, Artificial Sequence
  Synthetic
ccaucccaggaggaccuga

SEQ ID NO: 375 - RNA, 19 nt, Artificial Sequence
  Synthetic
aauuguaucaucaacauga

SEQ ID NO: 376 - RNA, 19 nt, Artificial Sequence
  Synthetic
aaggcccgaaacuaccuac

SEQ ID NO: 377 - RNA, 19 nt, Artificial Sequence
  Synthetic
cagucucugcccuccaaga

SEQ ID NO: 378 - RNA, 19 nt, Artificial Sequence
  Synthetic
accaagguggcuugggcca

SEQ ID NO: 379 - RNA, 19 nt, Artificial Sequence
  Synthetic
aagcuuuuccccaagucag

SEQ ID NO: 380 - RNA, 19 nt, Artificial Sequence
  Synthetic
gacuccaaagcccuugacc

SEQ ID NO: 381 - RNA, 19 nt, Artificial Sequence
  Synthetic
cugcuggaccggauguuaa

SEQ ID NO: 382 - RNA, 19 nt, Artificial Sequence
  Synthetic
accuuuaaccccaauaaac

SEQ ID NO: 383 - RNA, 19 nt, Artificial Sequence
  Synthetic
cggaucacaguggaggaag

SEQ ID NO: 384 - RNA, 19 nt, Artificial Sequence
  Synthetic
gcgcuggcucaccccuacc

SEQ ID NO: 385 - RNA, 19 nt, Artificial Sequence
  Synthetic
cuggagcaguacuaugacc

SEQ ID NO: 386 - RNA, 19 nt, Artificial Sequence
  Synthetic
ccgacggaugagccagugg

SEQ ID NO: 387 - RNA, 19 nt, Artificial Sequence
  Synthetic
gccgaggagcccuucaccu

SEQ ID NO: 388 - RNA, 19 nt, Artificial Sequence
  Synthetic
uucgccauggagcuggaug

SEQ ID NO: 389 - RNA, 19 nt, Artificial Sequence
  Synthetic
gaccuaccuaaggagcggc

SEQ ID NO: 390 - RNA, 19 nt, Artificial Sequence
  Synthetic
cugaaggagcucaucuucc

SEQ ID NO: 391 - RNA, 19 nt, Artificial Sequence
  Synthetic
caggagacagcacgcuucc

SEQ ID NO: 392 - RNA, 19 nt, Artificial Sequence
  Synthetic
cagcccggagugcuggagg

SEQ ID NO: 393 - RNA, 19 nt, Artificial Sequence
  Synthetic
gcccccuagcccagacaga

SEQ ID NO: 394 - RNA, 19 nt, Artificial Sequence
  Synthetic
acaucucugcacccugggg

SEQ ID NO: 395 - RNA, 19 nt, Artificial Sequence
  Synthetic
gccuggaacagaacuggca

SEQ ID NO: 396 - RNA, 19 nt, Artificial Sequence
  Synthetic
aaagaggcaagaggucacu

SEQ ID NO: 397 - RNA, 19 nt, Artificial Sequence
  Synthetic
ugagggccucugucaccca

SEQ ID NO: 398 - RNA, 19 nt, Artificial Sequence
  Synthetic
aggaccugccuccugccug

SEQ ID NO: 399 - RNA, 19 nt, Artificial Sequence
  Synthetic
gccccucucccgccagacu

SEQ ID NO: 400 - RNA, 19 nt, Artificial Sequence
  Synthetic
uguuagaaaauggacacug

SEQ ID NO: 401 - RNA, 19 nt, Artificial Sequence
  Synthetic
gugcccagcccggaccuug

SEQ ID NO: 402 - RNA, 19 nt, Artificial Sequence
  Synthetic
ggcagcccaggccggggug

SEQ ID NO: 403 - RNA, 19 nt, Artificial Sequence
  Synthetic
ggagcaugggccuggccac

SEQ ID NO: 404 - RNA, 19 nt, Artificial Sequence
  Synthetic
ccucucuccuuugcugagg

SEQ ID NO: 405 - RNA, 19 nt, Artificial Sequence
  Synthetic
gccuccagcuucaggcagg

SEQ ID NO: 406 - RNA, 19 nt, Artificial Sequence
  Synthetic
gccaaggccuucuccuccc

SEQ ID NO: 407 - RNA, 19 nt, Artificial Sequence
  Synthetic
ccacccgcccuccccacgg

SEQ ID NO: 408 - RNA, 19 nt, Artificial Sequence
  Synthetic
gggccucgggaccucaggu

SEQ ID NO: 409 - RNA, 19 nt, Artificial Sequence
  Synthetic
uggccccaguucaaucucc

SEQ ID NO: 410 - RNA, 19 nt, Artificial Sequence
  Synthetic
ccgcugcugcugcugcgcc

SEQ ID NO: 411 - RNA, 19 nt, Artificial Sequence
  Synthetic
ccuuaccuuccccagcguc

SEQ ID NO: 412 - RNA, 19 nt, Artificial Sequence
  Synthetic
cccagucucuggcaguucu

SEQ ID NO: 413 - RNA, 19 nt, Artificial Sequence
  Synthetic
uggaauggaaggguucugg

SEQ ID NO: 414 - RNA, 19 nt, Artificial Sequence
  Synthetic
gcugccccaaccugcugaa

SEQ ID NO: 415 - RNA, 19 nt, Artificial Sequence
  Synthetic
agggcagagguggagggug

SEQ ID NO: 416 - RNA, 19 nt, Artificial Sequence
  Synthetic
ggggggcgcugaguaggga

SEQ ID NO: 417 - RNA, 19 nt, Artificial Sequence
  Synthetic
acucagggccaugccugcc

SEQ ID NO: 418 - RNA, 19 nt, Artificial Sequence
  Synthetic
cccccucaucucauucaaa

SEQ ID NO: 419 - RNA, 19 nt, Artificial Sequence
  Synthetic
accccacccuaguuucccu

SEQ ID NO: 420 - RNA, 19 nt, Artificial Sequence
  Synthetic
ugaaggaacauuccuuagu

SEQ ID NO: 421 - RNA, 19 nt, Artificial Sequence
  Synthetic
ucucaagggcuagcauccc

SEQ ID NO: 422 - RNA, 19 nt, Artificial Sequence
  Synthetic
cugaggagccaggccgggc

SEQ ID NO: 423 - RNA, 19 nt, Artificial Sequence
  Synthetic
ccgaauccccucccuguca

SEQ ID NO: 424 - RNA, 19 nt, Artificial Sequence
  Synthetic
aaagcugucacuucgcgug

SEQ ID NO: 425 - RNA, 19 nt, Artificial Sequence
  Synthetic
gcccucgcugcuucugugu

SEQ ID NO: 426 - RNA, 19 nt, Artificial Sequence
  Synthetic
uguggugagcagaagugga

SEQ ID NO: 427 - RNA, 19 nt, Artificial Sequence
  Synthetic
agcuggggggcguggagag

SEQ ID NO: 428 - RNA, 19 nt, Artificial Sequence
  Synthetic
gcccggcgccccugccacc

SEQ ID NO: 429 - RNA, 19 nt, Artificial Sequence
  Synthetic
cucccugacccgucuaaua

SEQ ID NO: 430 - RNA, 19 nt, Artificial Sequence
  Synthetic
auauaaauauagagaugug

SEQ ID NO: 431 - RNA, 19 nt, Artificial Sequence
  Synthetic
auagagaugugucuauggc

SEQ ID NO: 432 - RNA, 19 nt, Artificial Sequence
  Synthetic
ggccccgcccgaggccccg

SEQ ID NO: 433 - RNA, 19 nt, Artificial Sequence
  Synthetic
cgcccuccuccccacggcg

SEQ ID NO: 434 - RNA, 19 nt, Artificial Sequence
  Synthetic
ccacuccuccccucccacc

SEQ ID NO: 435 - RNA, 19 nt, Artificial Sequence
  Synthetic
ccgccgccgccgccaucuc

SEQ ID NO: 436 - RNA, 19 nt, Artificial Sequence
  Synthetic
cgcccccgccccccugagc

SEQ ID NO: 437 - RNA, 19 nt, Artificial Sequence
  Synthetic
cgguucuacggggcucccc

SEQ ID NO: 438 - RNA, 19 nt, Artificial Sequence
  Synthetic
cccccgggccgacccccuc

SEQ ID NO: 439 - RNA, 19 nt, Artificial Sequence
  Synthetic
ucuccaccucccccgggac

SEQ ID NO: 440 - RNA, 19 nt, Artificial Sequence
  Synthetic
acggcugccccuucaccau

SEQ ID NO: 441 - RNA, 19 nt, Artificial Sequence
  Synthetic
agcgcgggcccacgucgaa

SEQ ID NO: 442 - RNA, 19 nt, Artificial Sequence
  Synthetic
uguacugcaacugcgugua

SEQ ID NO: 443 - RNA, 19 nt, Artificial Sequence
  Synthetic
cguacgcgcccucgccgau

SEQ ID NO: 444 - RNA, 19 nt, Artificial Sequence
  Synthetic
aggccgagcugaccaugcc

SEQ ID NO: 445 - RNA, 19 nt, Artificial Sequence
  Synthetic
ucuugcgcacguggucaua

SEQ ID NO: 446 - RNA, 19 nt, Artificial Sequence
  Synthetic
ucuugauggccacgcgagu

SEQ ID NO: 447 - RNA, 19 nt, Artificial Sequence
  Synthetic
guucgaaggggcugaucuu

SEQ ID NO: 448 - RNA, 19 nt, Artificial Sequence
  Synthetic
gcuggcaguaggucugaug

SEQ ID NO: 449 - RNA, 19 nt, Artificial Sequence
  Synthetic
ggaucucccggagcgugcg

SEQ ID NO: 450 - RNA, 19 nt, Artificial Sequence
  Synthetic
ggaagcgcagcaggaucug

SEQ ID NO: 451 - RNA, 19 nt, Artificial Sequence
  Synthetic
cgaugacauucucauggcg

SEQ ID NO: 452 - RNA, 19 nt, Artificial Sequence
  Synthetic
gcagaaugucucggaugcc

SEQ ID NO: 453 - RNA, 19 nt, Artificial Sequence
  Synthetic
cuuccaggguggacgcccg

SEQ ID NO: 454 - RNA, 19 nt, Artificial Sequence
  Synthetic
uguagacaucucucauggc

SEQ ID NO: 455 - RNA, 19 nt, Artificial Sequence
  Synthetic
ccaucagguccugcacaau

SEQ ID NO: 456 - RNA, 19 nt, Artificial Sequence
  Synthetic
acuuguacaggucagucuc

SEQ ID NO: 457 - RNA, 19 nt, Artificial Sequence
  Synthetic
gcugcuggcuuuucagcaa

SEQ ID NO: 458 - RNA, 19 nt, Artificial Sequence
  Synthetic
agauauggucauugcucag

SEQ ID NO: 459 - RNA, 19 nt, Artificial Sequence
  Synthetic
ucugguagaggaaguagca

SEQ ID NO: 460 - RNA, 19 nt, Artificial Sequence
  Synthetic
acuugaggccccgcaggau

SEQ ID NO: 461 - RNA, 19 nt, Artificial Sequence
  Synthetic
cguuggcggaguggaugua

SEQ ID NO: 462 - RNA, 19 nt, Artificial Sequence
  Synthetic
uuagaucucgguggagcac

SEQ ID NO: 463 - RNA, 19 nt, Artificial Sequence
  Synthetic
ugagcagguuggagggcuu

SEQ ID NO: 464 - RNA, 19 nt, Artificial Sequence
  Synthetic
ggucgcaggugguguugau

SEQ ID NO: 465 - RNA, 19 nt, Artificial Sequence
  Synthetic
cgaaaucacaaaucuuaag

SEQ ID NO: 466 - RNA, 19 nt, Artificial Sequence
  Synthetic
cggcaauccgggccaggcc

SEQ ID NO: 467 - RNA, 19 nt, Artificial Sequence
  Synthetic
uguggucaugcucaggauc

SEQ ID NO: 468 - RNA, 19 nt, Artificial Sequence
  Synthetic
acuccgucaggaagccggu

SEQ ID NO: 469 - RNA, 19 nt, Artificial Sequence
  Synthetic
accagcgcguagccacaua

SEQ ID NO: 470 - RNA, 19 nt, Artificial Sequence
  Synthetic
ugaucucuggggcccggua

SEQ ID NO: 471 - RNA, 19 nt, Artificial Sequence
  Synthetic
agcccuuggaguucagcau

SEQ ID NO: 472 - RNA, 19 nt, Artificial Sequence
  Synthetic
ugucgauggacuugguaua

SEQ ID NO: 473 - RNA, 19 nt, Artificial Sequence
  Synthetic
ugcagcccacagaccagau

SEQ ID NO: 474 - RNA, 19 nt, Artificial Sequence
  Synthetic
agagcaucucagccagaau

SEQ ID NO: 475 - RNA, 19 nt, Artificial Sequence
  Synthetic
ggaagaugggccgguuaga

SEQ ID NO: 476 - RNA, 19 nt, Artificial Sequence
  Synthetic
ccagguagugcuugccagg

SEQ ID NO: 477 - RNA, 19 nt, Artificial Sequence
  Synthetic
gaaugugguugagcugauc

SEQ ID NO: 478 - RNA, 19 nt, Artificial Sequence
  Synthetic
gggagcccaggaugcccag

SEQ ID NO: 479 - RNA, 19 nt, Artificial Sequence
  Synthetic
ucagguccuccugggaugg

SEQ ID NO: 480 - RNA, 19 nt, Artificial Sequence
  Synthetic
ucauguugaugauacaauu

SEQ ID NO: 481 - RNA, 19 nt, Artificial Sequence
  Synthetic
guagguaguuucgggccuu

SEQ ID NO: 482 - RNA, 19 nt, Artificial Sequence
  Synthetic
ucuuggagggcagagacug

SEQ ID NO: 483 - RNA, 19 nt, Artificial Sequence
  Synthetic
uggcccaagccaccuuggu

SEQ ID NO: 484 - RNA, 19 nt, Artificial Sequence
  Synthetic
cugacuuggggaaaagcuu

SEQ ID NO: 485 - RNA, 19 nt, Artificial Sequence
  Synthetic
ggucaagggcuuuggaguc

SEQ ID NO: 486 - RNA, 19 nt, Artificial Sequence
  Synthetic
uuaacauccgguccagcag

SEQ ID NO: 487 - RNA, 19 nt, Artificial Sequence
  Synthetic
guuuauugggguuaaaggu

SEQ ID NO: 488 - RNA, 19 nt, Artificial Sequence
  Synthetic
cuuccuccacugugauccg

SEQ ID NO: 489 - RNA, 19 nt, Artificial Sequence
  Synthetic
gguaggggugagccagcgc

SEQ ID NO: 490 - RNA, 19 nt, Artificial Sequence
  Synthetic
ggucauaguacugcuccag

SEQ ID NO: 491 - RNA, 19 nt, Artificial Sequence
  Synthetic
ccacuggcucauccgucgg

SEQ ID NO: 492 - RNA, 19 nt, Artificial Sequence
  Synthetic
aggugaagggcuccucggc

SEQ ID NO: 493 - RNA, 19 nt, Artificial Sequence
  Synthetic
cauccagcuccauggcgaa

SEQ ID NO: 494 - RNA, 19 nt, Artificial Sequence
  Synthetic
gccgcuccuuagguagguc

SEQ ID NO: 495 - RNA, 19 nt, Artificial Sequence
  Synthetic
ggaagaugagcuccuucag

SEQ ID NO: 496 - RNA, 19 nt, Artificial Sequence
  Synthetic
ggaagcgugcugucuccug

SEQ ID NO: 497 - RNA, 19 nt, Artificial Sequence
  Synthetic
ccuccagcacuccgggcug

SEQ ID NO: 498 - RNA, 19 nt, Artificial Sequence
  Synthetic
ucugucugggcuagggggc

SEQ ID NO: 499 - RNA, 19 nt, Artificial Sequence
  Synthetic
ccccagggugcagagaugu

SEQ ID NO: 500 - RNA, 19 nt, Artificial Sequence
  Synthetic
ugccaguucuguuccaggc

SEQ ID NO: 501 - RNA, 19 nt, Artificial Sequence
  Synthetic
agugaccucuugccucuuu

SEQ ID NO: 502 - RNA, 19 nt, Artificial Sequence
  Synthetic
ugggugacagaggcccuca

SEQ ID NO: 503 - RNA, 19 nt, Artificial Sequence
  Synthetic
caggcaggaggcagguccu

SEQ ID NO: 504 - RNA, 19 nt, Artificial Sequence
  Synthetic
agucuggcgggagaggggc

SEQ ID NO: 505 - RNA, 19 nt, Artificial Sequence
  Synthetic
caguguccauuuucuaaca

SEQ ID NO: 506 - RNA, 19 nt, Artificial Sequence
  Synthetic
caagguccgggcugggcac

SEQ ID NO: 507 - RNA, 19 nt, Artificial Sequence
  Synthetic
caccccggccugggcugcc

SEQ ID NO: 508 - RNA, 19 nt, Artificial Sequence
  Synthetic
guggccaggcccaugcucc

SEQ ID NO: 509 - RNA, 19 nt, Artificial Sequence
  Synthetic
ccucagcaaaggagagagg

SEQ ID NO: 510 - RNA, 19 nt, Artificial Sequence
  Synthetic
ccugccugaagcuggaggc

SEQ ID NO: 511 - RNA, 19 nt, Artificial Sequence
  Synthetic
gggaggagaaggccuuggc

SEQ ID NO: 512 - RNA, 19 nt, Artificial Sequence
  Synthetic
ccguggggagggcgggugg

SEQ ID NO: 513 - RNA, 19 nt, Artificial Sequence
  Synthetic
accugaggucccgaggccc

SEQ ID NO: 514 - RNA, 19 nt, Artificial Sequence
  Synthetic
ggagauugaacuggggcca

SEQ ID NO: 515 - RNA, 19 nt, Artificial Sequence
  Synthetic
ggcgcagcagcagcagcgg

SEQ ID NO: 516 - RNA, 19 nt, Artificial Sequence
  Synthetic
gacgcuggggaagguaagg

SEQ ID NO: 517 - RNA, 19 nt, Artificial Sequence
  Synthetic
agaacugccagagacuggg

SEQ ID NO: 518 - RNA, 19 nt, Artificial Sequence
  Synthetic
ccagaacccuuccauucca

SEQ ID NO: 519 - RNA, 19 nt, Artificial Sequence
  Synthetic
uucagcagguuggggcagc

SEQ ID NO: 520 - RNA, 19 nt, Artificial Sequence
  Synthetic
cacccuccaccucugcccu

SEQ ID NO: 521 - RNA, 19 nt, Artificial Sequence
  Synthetic
ucccuacucagcgcccccc

SEQ ID NO: 522 - RNA, 19 nt, Artificial Sequence
  Synthetic
ggcaggcauggcccugagu

SEQ ID NO: 523 - RNA, 19 nt, Artificial Sequence
  Synthetic
uuugaaugagaugaggggg

SEQ ID NO: 524 - RNA, 19 nt, Artificial Sequence
  Synthetic
agggaaacuaggguggggu

SEQ ID NO: 525 - RNA, 19 nt, Artificial Sequence
  Synthetic
acuaaggaauguuccuuca

SEQ ID NO: 526 - RNA, 19 nt, Artificial Sequence
  Synthetic
gggaugcuagcccuugaga

SEQ ID NO: 527 - RNA, 19 nt, Artificial Sequence
  Synthetic
gcccggccuggcuccucag

SEQ ID NO: 528 - RNA, 19 nt, Artificial Sequence
  Synthetic
ugacagggaggggauucgg

SEQ ID NO: 529 - RNA, 19 nt, Artificial Sequence
  Synthetic
cacgcgaagugacagcuuu

SEQ ID NO: 530 - RNA, 19 nt, Artificial Sequence
  Synthetic
acacagaagcagcgagggc

SEQ ID NO: 531 - RNA, 19 nt, Artificial Sequence
  Synthetic
uccacuucugcucaccaca

SEQ ID NO: 532 - RNA, 19 nt, Artificial Sequence
  Synthetic
cucuccacgccccccagcu

SEQ ID NO: 533 - RNA, 19 nt, Artificial Sequence
  Synthetic
gguggcaggggcgccgggc

SEQ ID NO: 534 - RNA, 19 nt, Artificial Sequence
  Synthetic
uauuagacgggucagggag

SEQ ID NO: 535 - RNA, 19 nt, Artificial Sequence
  Synthetic
cacaucucuauauuuauau

SEQ ID NO: 536 - RNA, 19 nt, Artificial Sequence
  Synthetic
gccauagacacaucucuau

SEQ ID NO: 537 - RNA, 19 nt, Artificial Sequence
  Synthetic
uaauugcuugccaucauga

SEQ ID NO: 538 - RNA, 19 nt, Artificial Sequence
  Synthetic
agcagaagcaagcgugaca

SEQ ID NO: 539 - RNA, 19 nt, Artificial Sequence
  Synthetic
aacaauuuuuauaguguag

SEQ ID NO: 540 - RNA, 19 nt, Artificial Sequence
  Synthetic
gagauuggagauucuacau

SEQ ID NO: 541 - RNA, 19 nt, Artificial Sequence
  Synthetic
uucacaguccugaaacgau

SEQ ID NO: 542 - RNA, 19 nt, Artificial Sequence
  Synthetic
uaucagaauuuaaaaccua

SEQ ID NO: 543 - RNA, 19 nt, Artificial Sequence
  Synthetic
auaggcucaggagcucaag

SEQ ID NO: 544 - RNA, 19 nt, Artificial Sequence
  Synthetic
ggaauaguaugcgcagcuu

SEQ ID NO: 545 - RNA, 19 nt, Artificial Sequence
  Synthetic
uaugaugccauucuugaaa

SEQ ID NO: 546 - RNA, 19 nt, Artificial Sequence
  Synthetic
agaaauguugcaaucaaga

SEQ ID NO: 547 - RNA, 19 nt, Artificial Sequence
  Synthetic
aagcuaagccgaccauuuc

SEQ ID NO: 548 - RNA, 19 nt, Artificial Sequence
  Synthetic
cagaaucagacucaugcca

SEQ ID NO: 549 - RNA, 19 nt, Artificial Sequence
  Synthetic
aagcgggccuacagagagc

SEQ ID NO: 550 - RNA, 19 nt, Artificial Sequence
  Synthetic
cuaguucuuaugaaaugug

SEQ ID NO: 551 - RNA, 19 nt, Artificial Sequence
  Synthetic
guuaaucacaaaaauauaa

SEQ ID NO: 552 - RNA, 19 nt, Artificial Sequence
  Synthetic
auuggccuuuugaauguuu

SEQ ID NO: 553 - RNA, 19 nt, Artificial Sequence
  Synthetic
uucacaccacagaaauccc

SEQ ID NO: 554 - RNA, 19 nt, Artificial Sequence
  Synthetic
cuagaagaauuucaagaug

SEQ ID NO: 555 - RNA, 19 nt, Artificial Sequence
  Synthetic
guuuacauagucauggagc

SEQ ID NO: 556 - RNA, 19 nt, Artificial Sequence
  Synthetic
cucauggaugcaaaucuuu

SEQ ID NO: 557 - RNA, 19 nt, Artificial Sequence
  Synthetic
ugccaagugauucagaugg

SEQ ID NO: 558 - RNA, 19 nt, Artificial Sequence
  Synthetic
gagcuagaucaugaaagaa

SEQ ID NO: 559 - RNA, 19 nt, Artificial Sequence
  Synthetic
auguccuaccuucucuauc

SEQ ID NO: 560 - RNA, 19 nt, Artificial Sequence
  Synthetic
cagaugcuguguggaauca

SEQ ID NO: 561 - RNA, 19 nt, Artificial Sequence
  Synthetic
aagcaccuucauucugcug

SEQ ID NO: 562 - RNA, 19 nt, Artificial Sequence
  Synthetic
ggaauuauucaucgggacu

SEQ ID NO: 563 - RNA, 19 nt, Artificial Sequence
  Synthetic
uuaaagcccaguaauauag

SEQ ID NO: 564 - RNA, 19 nt, Artificial Sequence
  Synthetic
guaguaaaaucugauugca

SEQ ID NO: 565 - RNA, 19 nt, Artificial Sequence
  Synthetic
acuuugaagauucuugacu

SEQ ID NO: 566 - RNA, 19 nt, Artificial Sequence
  Synthetic
uucggucuggccaggacug

SEQ ID NO: 567 - RNA, 19 nt, Artificial Sequence
  Synthetic
gcaggaacgaguuuuauga

SEQ ID NO: 568 - RNA, 19 nt, Artificial Sequence
  Synthetic
augacgccuuauguaguga

SEQ ID NO: 569 - RNA, 19 nt, Artificial Sequence
  Synthetic
acucgcuacuacagagcac

SEQ ID NO: 570 - RNA, 19 nt, Artificial Sequence
  Synthetic
cccgaggucauccuuggca

SEQ ID NO: 571 - RNA, 19 nt, Artificial Sequence
  Synthetic
augggcuacaaggaaaacg

SEQ ID NO: 572 - RNA, 19 nt, Artificial Sequence
  Synthetic
guggauuuauggucugugg

SEQ ID NO: 573 - RNA, 19 nt, Artificial Sequence
  Synthetic
gggugcauuaugggagaaa

SEQ ID NO: 574 - RNA, 19 nt, Artificial Sequence
  Synthetic
augguuugccacaaaaucc

SEQ ID NO: 575 - RNA, 19 nt, Artificial Sequence
  Synthetic
cucuuuccaggaagggacu

SEQ ID NO: 576 - RNA, 19 nt, Artificial Sequence
  Synthetic
uauauugaucaguggaaua

SEQ ID NO: 577 - RNA, 19 nt, Artificial Sequence
  Synthetic
aaaguuauugaacagcuug

SEQ ID NO: 578 - RNA, 19 nt, Artificial Sequence
  Synthetic
ggaacaccauguccugaau

SEQ ID NO: 579 - RNA, 19 nt, Artificial Sequence
  Synthetic
uucaugaagaaacugcaac

SEQ ID NO: 580 - RNA, 19 nt, Artificial Sequence
  Synthetic
ccaacaguaaggacuuacg

SEQ ID NO: 581 - RNA, 19 nt, Artificial Sequence
  Synthetic
guugaaaacagaccuaaau

SEQ ID NO: 582 - RNA, 19 nt, Artificial Sequence
  Synthetic
uaugcuggauauagcuuug

SEQ ID NO: 583 - RNA, 19 nt, Artificial Sequence
  Synthetic
gagaaacucuucccugaug

SEQ ID NO: 584 - RNA, 19 nt, Artificial Sequence
  Synthetic
guccuuuucccagcugacu

SEQ ID NO: 585 - RNA, 19 nt, Artificial Sequence
  Synthetic
ucagaacacaacaaacuua

SEQ ID NO: 586 - RNA, 19 nt, Artificial Sequence
  Synthetic
aaagccagucaggcaaggg

SEQ ID NO: 587 - RNA, 19 nt, Artificial Sequence
  Synthetic
gauuuguuauccaaaaugc

SEQ ID NO: 588 - RNA, 19 nt, Artificial Sequence
  Synthetic
cugguaauagaugcaucua

SEQ ID NO: 589 - RNA, 19 nt, Artificial Sequence
  Synthetic
aaaaggaucucuguagaug

SEQ ID NO: 590 - RNA, 19 nt, Artificial Sequence
  Synthetic
gaagcucuccaacacccgu

SEQ ID NO: 591 - RNA, 19 nt, Artificial Sequence
  Synthetic
uacaucaaugucugguaug

SEQ ID NO: 592 - RNA, 19 nt, Artificial Sequence
  Synthetic
gauccuucugaagcagaag

SEQ ID NO: 593 - RNA, 19 nt, Artificial Sequence
  Synthetic
gcuccaccaccaaagaucc

SEQ ID NO: 594 - RNA, 19 nt, Artificial Sequence
  Synthetic
ccugacaagcaguuagaug

SEQ ID NO: 595 - RNA, 19 nt, Artificial Sequence
  Synthetic
gaaagggaacacacaauag

SEQ ID NO: 596 - RNA, 19 nt, Artificial Sequence
  Synthetic
gaagaguggaaagaauuga

SEQ ID NO: 597 - RNA, 19 nt, Artificial Sequence
  Synthetic
auauauaaggaaguuaugg

SEQ ID NO: 598 - RNA, 19 nt, Artificial Sequence
  Synthetic
gacuuggaggagagaacca

SEQ ID NO: 599 - RNA, 19 nt, Artificial Sequence
  Synthetic
aagaauggaguuauacggg

SEQ ID NO: 600 - RNA, 19 nt, Artificial Sequence
  Synthetic
gggcagcccucuccuuuag

SEQ ID NO: 601 - RNA, 19 nt, Artificial Sequence
  Synthetic
gcacaggugcagcagugau

SEQ ID NO: 602 - RNA, 19 nt, Artificial Sequence
  Synthetic
ucaauggcucucagcaucc

SEQ ID NO: 603 - RNA, 19 nt, Artificial Sequence
  Synthetic
caucaucaucgucgucugu

SEQ ID NO: 604 - RNA, 19 nt, Artificial Sequence
  Synthetic
ucaaugaugugucuucaau

SEQ ID NO: 605 - RNA, 19 nt, Artificial Sequence
  Synthetic
ugucaacagauccgacuuu

SEQ ID NO: 606 - RNA, 19 nt, Artificial Sequence
  Synthetic
uggccucugauacagacag

SEQ ID NO: 607 - RNA, 19 nt, Artificial Sequence
  Synthetic
gcagucuagaagcagcagc

SEQ ID NO: 608 - RNA, 19 nt, Artificial Sequence
  Synthetic
cugggccucugggcugcug

SEQ ID NO: 609 - RNA, 19 nt, Artificial Sequence
  Synthetic
guagaugacuacuugggcc

SEQ ID NO: 610 - RNA, 19 nt, Artificial Sequence
  Synthetic
caucggggggugggaggga

SEQ ID NO: 611 - RNA, 19 nt, Artificial Sequence
  Synthetic
auggggagucgguuaguca

SEQ ID NO: 612 - RNA, 19 nt, Artificial Sequence
  Synthetic
auugauagaacuacuuuga

SEQ ID NO: 613 - RNA, 19 nt, Artificial Sequence
  Synthetic
aaaacaauucaguggucuu

SEQ ID NO: 614 - RNA, 19 nt, Artificial Sequence
  Synthetic
uauuuuugggugauuuuuc

SEQ ID NO: 615 - RNA, 19 nt, Artificial Sequence
  Synthetic
ggugauuuuucaaaaaaug

SEQ ID NO: 616 - RNA, 19 nt, Artificial Sequence
  Synthetic
ucaugauggcaagcaauua

SEQ ID NO: 617 - RNA, 19 nt, Artificial Sequence
  Synthetic
ugucacgcuugcuucugcu

SEQ ID NO: 618 - RNA, 19 nt, Artificial Sequence
  Synthetic
cuacacuauaaaaauuguu

SEQ ID NO: 619 - RNA, 19 nt, Artificial Sequence
  Synthetic
auguagaaucuccaaucuc

SEQ ID NO: 620 - RNA, 19 nt, Artificial Sequence
  Synthetic
aucguuucaggacugugaa

SEQ ID NO: 621 - RNA, 19 nt, Artificial Sequence
  Synthetic
uagguuuuaaauucugaua

SEQ ID NO: 622 - RNA, 19 nt, Artificial Sequence
  Synthetic
cuugagcuccugagccuau

SEQ ID NO: 623 - RNA, 19 nt, Artificial Sequence
  Synthetic
aagcugcgcauacuauucc

SEQ ID NO: 624 - RNA, 19 nt, Artificial Sequence
  Synthetic
uuucaagaauggcaucaua

SEQ ID NO: 625 - RNA, 19 nt, Artificial Sequence
  Synthetic
ucuugauugcaacauuucu

SEQ ID NO: 626 - RNA, 19 nt, Artificial Sequence
  Synthetic
gaaauggucggcuuagcuu

SEQ ID NO: 627 - RNA, 19 nt, Artificial Sequence
  Synthetic
uggcaugagucugauucug

SEQ ID NO: 628 - RNA, 19 nt, Artificial Sequence
  Synthetic
gcucucuguaggcccgcuu

SEQ ID NO: 629 - RNA, 19 nt, Artificial Sequence
  Synthetic
cacauuucauaagaacuag

SEQ ID NO: 630 - RNA, 19 nt, Artificial Sequence
  Synthetic
uuauauuuuugugauuaac

SEQ ID NO: 631 - RNA, 19 nt, Artificial Sequence
  Synthetic
aaacauucaaaaggccaau

SEQ ID NO: 632 - RNA, 19 nt, Artificial Sequence
  Synthetic
gggauuucuguggugugaa

SEQ ID NO: 633 - RNA, 19 nt, Artificial Sequence
  Synthetic
caucuugaaauucuucuag

SEQ ID NO: 634 - RNA, 19 nt, Artificial Sequence
  Synthetic
gcuccaugacuauguaaac

SEQ ID NO: 635 - RNA, 19 nt, Artificial Sequence
  Synthetic
aaagauuugcauccaugag

SEQ ID NO: 636 - RNA, 19 nt, Artificial Sequence
  Synthetic
ccaucugaaucacuuggca

SEQ ID NO: 637 - RNA, 19 nt, Artificial Sequence
  Synthetic
uucuuucaugaucuagcuc

SEQ ID NO: 638 - RNA, 19 nt, Artificial Sequence
  Synthetic
gauagagaagguaggacau

SEQ ID NO: 639 - RNA, 19 nt, Artificial Sequence
  Synthetic
ugauuccacacagcaucug

SEQ ID NO: 640 - RNA, 19 nt, Artificial Sequence
  Synthetic
cagcagaaugaaggugcuu

SEQ ID NO: 641 - RNA, 19 nt, Artificial Sequence
  Synthetic
agucccgaugaauaauucc

SEQ ID NO: 642 - RNA, 19 nt, Artificial Sequence
  Synthetic
cuauauuacugggcuuuaa

SEQ ID NO: 643 - RNA, 19 nt, Artificial Sequence
  Synthetic
ugcaaucagauuuuacuac

SEQ ID NO: 644 - RNA, 19 nt, Artificial Sequence
  Synthetic
agucaagaaucuucaaagu

SEQ ID NO: 645 - RNA, 19 nt, Artificial Sequence
  Synthetic
caguccuggccagaccgaa

SEQ ID NO: 646 - RNA, 19 nt, Artificial Sequence
  Synthetic
ucauaaaacucguuccugc

SEQ ID NO: 647 - RNA, 19 nt, Artificial Sequence
  Synthetic
ucacuacauaaggcgucau

SEQ ID NO: 648 - RNA, 19 nt, Artificial Sequence
  Synthetic
gugcucuguaguagcgagu

SEQ ID NO: 649 - RNA, 19 nt, Artificial Sequence
  Synthetic
ugccaaggaugaccucggg

SEQ ID NO: 650 - RNA, 19 nt, Artificial Sequence
  Synthetic
cguuuuccuuguagcccau

SEQ ID NO: 651 - RNA, 19 nt, Artificial Sequence
  Synthetic
ccacagaccauaaauccac

SEQ ID NO: 652 - RNA, 19 nt, Artificial Sequence
  Synthetic
uuucucccauaaugcaccc

SEQ ID NO: 653 - RNA, 19 nt, Artificial Sequence
  Synthetic
ggauuuuguggcaaaccau

SEQ ID NO: 654 - RNA, 19 nt, Artificial Sequence
  Synthetic
agucccuuccuggaaagag

SEQ ID NO: 655 - RNA, 19 nt, Artificial Sequence
  Synthetic
uauuccacugaucaauaua

SEQ ID NO: 656 - RNA, 19 nt, Artificial Sequence
  Synthetic
caagcuguucaauaacuuu

SEQ ID NO: 657 - RNA, 19 nt, Artificial Sequence
  Synthetic
auucaggacaugguguucc

SEQ ID NO: 658 - RNA, 19 nt, Artificial Sequence
  Synthetic
guugcaguuucuucaugaa

SEQ ID NO: 659 - RNA, 19 nt, Artificial Sequence
  Synthetic
cguaaguccuuacuguugg

SEQ ID NO: 660 - RNA, 19 nt, Artificial Sequence
  Synthetic
auuuaggucuguuuucaac

SEQ ID NO: 661 - RNA, 19 nt, Artificial Sequence
  Synthetic
caaagcuauauccagcaua

SEQ ID NO: 662 - RNA, 19 nt, Artificial Sequence
  Synthetic
caucagggaagaguuucuc

SEQ ID NO: 663 - RNA, 19 nt, Artificial Sequence
  Synthetic
agucagcugggaaaaggac

SEQ ID NO: 664 - RNA, 19 nt, Artificial Sequence
  Synthetic
uaaguuuguuguguucuga

SEQ ID NO: 665 - RNA, 19 nt, Artificial Sequence
  Synthetic
cccuugccugacuggcuuu

SEQ ID NO: 666 - RNA, 19 nt, Artificial Sequence
  Synthetic
gcauuuuggauaacaaauc

SEQ ID NO: 667 - RNA, 19 nt, Artificial Sequence
  Synthetic
uagaugcaucuauuaccag

SEQ ID NO: 668 - RNA, 19 nt, Artificial Sequence
  Synthetic
caucuacagagauccuuuu

SEQ ID NO: 669 - RNA, 19 nt, Artificial Sequence
  Synthetic
acggguguuggagagcuuc

SEQ ID NO: 670 - RNA, 19 nt, Artificial Sequence
  Synthetic
cauaccagacauugaugua

SEQ ID NO: 671 - RNA, 19 nt, Artificial Sequence
  Synthetic
cuucugcuucagaaggauc

SEQ ID NO: 672 - RNA, 19 nt, Artificial Sequence
  Synthetic
ggaucuuuggugguggagc

SEQ ID NO: 673 - RNA, 19 nt, Artificial Sequence
  Synthetic
caucuaacugcuugucagg

SEQ ID NO: 674 - RNA, 19 nt, Artificial Sequence
  Synthetic
cuauuguguguucccuuuc

SEQ ID NO: 675 - RNA, 19 nt, Artificial Sequence
  Synthetic
ucaauucuuuccacucuuc

SEQ ID NO: 676 - RNA, 19 nt, Artificial Sequence
  Synthetic
ccauaacuuccuuauauau

SEQ ID NO: 677 - RNA, 19 nt, Artificial Sequence
  Synthetic
ugguucucuccuccaaguc

SEQ ID NO: 678 - RNA, 19 nt, Artificial Sequence
  Synthetic
cccguauaacuccauucuu

SEQ ID NO: 679 - RNA, 19 nt, Artificial Sequence
  Synthetic
cuaaaggagagggcugccc

SEQ ID NO: 680 - RNA, 19 nt, Artificial Sequence
  Synthetic
aucacugcugcaccugugc

SEQ ID NO: 681 - RNA, 19 nt, Artificial Sequence
  Synthetic
ggaugcugagagccauuga

SEQ ID NO: 682 - RNA, 19 nt, Artificial Sequence
  Synthetic
acagacgacgaugaugaug

SEQ ID NO: 683 - RNA, 19 nt, Artificial Sequence
  Synthetic
auugaagacacaucauuga

SEQ ID NO: 684 - RNA, 19 nt, Artificial Sequence
  Synthetic
aaagucggaucuguugaca

SEQ ID NO: 685 - RNA, 19 nt, Artificial Sequence
  Synthetic
cugucuguaucagaggcca

SEQ ID NO: 686 - RNA, 19 nt, Artificial Sequence
  Synthetic
gcugcugcuucuagacugc

SEQ ID NO: 687 - RNA, 19 nt, Artificial Sequence
  Synthetic
cagcagcccagaggcccag

SEQ ID NO: 688 - RNA, 19 nt, Artificial Sequence
  Synthetic
ggcccaaguagucaucuac

SEQ ID NO: 689 - RNA, 19 nt, Artificial Sequence
  Synthetic
ucccucccaccccccgaug

SEQ ID NO: 690 - RNA, 19 nt, Artificial Sequence
  Synthetic
ugacuaaccgacuccccau

SEQ ID NO: 691 - RNA, 19 nt, Artificial Sequence
  Synthetic
ucaaaguaguucuaucaau

SEQ ID NO: 692 - RNA, 19 nt, Artificial Sequence
  Synthetic
aagaccacugaauuguuuu

SEQ ID NO: 693 - RNA, 19 nt, Artificial Sequence
  Synthetic
gaaaaaucacccaaaaaua

SEQ ID NO: 694 - RNA, 19 nt, Artificial Sequence
  Synthetic
cauuuuuugaaaaaucacc

SEQ ID NO: 695 - RNA, 19 nt, Artificial Sequence
  Synthetic
aaccgcgaccacuggagcc

SEQ ID NO: 696 - RNA, 19 nt, Artificial Sequence
  Synthetic
cuuagcgggcgcagcagcu

SEQ ID NO: 697 - RNA, 19 nt, Artificial Sequence
  Synthetic
uggaacgggaguacugcga

SEQ ID NO: 698 - RNA, 19 nt, Artificial Sequence
  Synthetic
acgcagcccggagucggcc

SEQ ID NO: 699 - RNA, 19 nt, Artificial Sequence
  Synthetic
cuuguaggggcgaaggugc

SEQ ID NO: 700 - RNA, 19 nt, Artificial Sequence
  Synthetic
cagggagaucgcggcgggc

SEQ ID NO: 701 - RNA, 19 nt, Artificial Sequence
  Synthetic
cgcagucuugagcgccgga

SEQ ID NO: 702 - RNA, 19 nt, Artificial Sequence
  Synthetic
agcgcgucccugcccuuag

SEQ ID NO: 703 - RNA, 19 nt, Artificial Sequence
  Synthetic
gcggggcuugccccagucg

SEQ ID NO: 704 - RNA, 19 nt, Artificial Sequence
  Synthetic
gcaggggcacauccagccg

SEQ ID NO: 705 - RNA, 19 nt, Artificial Sequence
  Synthetic
gcugcggcugacagcagcc

SEQ ID NO: 706 - RNA, 19 nt, Artificial Sequence
  Synthetic
cgcgcgcgcgggagucugc

SEQ ID NO: 707 - RNA, 19 nt, Artificial Sequence
  Synthetic
cggggucgcggcagccgca

SEQ ID NO: 708 - RNA, 19 nt, Artificial Sequence
  Synthetic
accugcgcgggcgaccagc

SEQ ID NO: 709 - RNA, 19 nt, Artificial Sequence
  Synthetic
cgcaagguccccgcccggc

SEQ ID NO: 710 - RNA, 19 nt, Artificial Sequence
  Synthetic
cugggcgggcagcaagggc

SEQ ID NO: 711 - RNA, 19 nt, Artificial Sequence
  Synthetic
ccggggagagggugcgggu

SEQ ID NO: 712 - RNA, 19 nt, Artificial Sequence
  Synthetic
ugcaggcgggggccccaca

SEQ ID NO: 713 - RNA, 19 nt, Artificial Sequence
  Synthetic
agggccaccuucuugcccg

SEQ ID NO: 714 - RNA, 19 nt, Artificial Sequence
  Synthetic
ggcggcugccgcuggaaaa

SEQ ID NO: 715 - RNA, 19 nt, Artificial Sequence
  Synthetic
augucucaggagaggccca

SEQ ID NO: 716 - RNA, 19 nt, Artificial Sequence
  Synthetic
acguucuaccggcaggagc

SEQ ID NO: 717 - RNA, 19 nt, Artificial Sequence
  Synthetic
cugaacaagacaaucuggg

SEQ ID NO: 718 - RNA, 19 nt, Artificial Sequence
  Synthetic
gaggugcccgagcguuacc

SEQ ID NO: 719 - RNA, 19 nt, Artificial Sequence
  Synthetic
cagaaccugucuccagugg

SEQ ID NO: 720 - RNA, 19 nt, Artificial Sequence
  Synthetic
ggcucuggcgccuauggcu

SEQ ID NO: 721 - RNA, 19 nt, Artificial Sequence
  Synthetic
ucugugugugcugcuuuug

SEQ ID NO: 722 - RNA, 19 nt, Artificial Sequence
  Synthetic
gacacaaaaacgggguuac

SEQ ID NO: 723 - RNA, 19 nt, Artificial Sequence
  Synthetic
cguguggcagugaagaagc

SEQ ID NO: 724 - RNA, 19 nt, Artificial Sequence
  Synthetic
cucuccagaccauuucagu

SEQ ID NO: 725 - RNA, 19 nt, Artificial Sequence
  Synthetic
uccaucauucaugcgaaaa

SEQ ID NO: 726 - RNA, 19 nt, Artificial Sequence
  Synthetic
agaaccuacagagaacugc

SEQ ID NO: 727 - RNA, 19 nt, Artificial Sequence
  Synthetic
cgguuacuuaaacauauga

SEQ ID NO: 728 - RNA, 19 nt, Artificial Sequence
  Synthetic
aaacaugaaaaugugauug

SEQ ID NO: 729 - RNA, 19 nt, Artificial Sequence
  Synthetic
ggucuguuggacguuuuua

SEQ ID NO: 730 - RNA, 19 nt, Artificial Sequence
  Synthetic
acaccugcaaggucucugg

SEQ ID NO: 731 - RNA, 19 nt, Artificial Sequence
  Synthetic
gaggaauucaaugaugugu

SEQ ID NO: 732 - RNA, 19 nt, Artificial Sequence
  Synthetic
uaucuggugacccaucuca

SEQ ID NO: 733 - RNA, 19 nt, Artificial Sequence
  Synthetic
augggggcagaucugaaca

SEQ ID NO: 734 - RNA, 19 nt, Artificial Sequence
  Synthetic
aacauugugaaaugucaga

SEQ ID NO: 735 - RNA, 19 nt, Artificial Sequence
  Synthetic
aagcuuacagaugaccaug

SEQ ID NO: 736 - RNA, 19 nt, Artificial Sequence
  Synthetic
guucaguuccuuaucuacc

SEQ ID NO: 737 - RNA, 19 nt, Artificial Sequence
  Synthetic
caaauucuccgaggucuaa

SEQ ID NO: 738 - RNA, 19 nt, Artificial Sequence
  Synthetic
aaguauauacauucagcug

SEQ ID NO: 739 - RNA, 19 nt, Artificial Sequence
  Synthetic
gacauaauucacagggacc

SEQ ID NO: 740 - RNA, 19 nt, Artificial Sequence
  Synthetic
cuaaaaccuaguaaucuag

SEQ ID NO: 741 - RNA, 19 nt, Artificial Sequence
  Synthetic
gcugugaaugaagacugug

SEQ ID NO: 742 - RNA, 19 nt, Artificial Sequence
  Synthetic
gagcugaagauucuggauu

SEQ ID NO: 743 - RNA, 19 nt, Artificial Sequence
  Synthetic
uuuggacuggcucggcaca

SEQ ID NO: 744 - RNA, 19 nt, Artificial Sequence
  Synthetic
acagaugaugaaaugacag

SEQ ID NO: 745 - RNA, 19 nt, Artificial Sequence
  Synthetic
ggcuacguggccacuaggu

SEQ ID NO: 746 - RNA, 19 nt, Artificial Sequence
  Synthetic
ugguacagggcuccugaga

SEQ ID NO: 747 - RNA, 19 nt, Artificial Sequence
  Synthetic
aucaugcugaacuggaugc

SEQ ID NO: 748 - RNA, 19 nt, Artificial Sequence
  Synthetic
cauuacaaccagacaguug

SEQ ID NO: 749 - RNA, 19 nt, Artificial Sequence
  Synthetic
gauauuuggucagugggau

SEQ ID NO: 750 - RNA, 19 nt, Artificial Sequence
  Synthetic
ugcauaauggccgagcugu

SEQ ID NO: 751 - RNA, 19 nt, Artificial Sequence
  Synthetic
uugacuggaagaacauugu

SEQ ID NO: 752 - RNA, 19 nt, Artificial Sequence
  Synthetic
uuuccugguacagaccaua

SEQ ID NO: 753 - RNA, 19 nt, Artificial Sequence
  Synthetic
auugaucaguugaagcuca

SEQ ID NO: 754 - RNA, 19 nt, Artificial Sequence
  Synthetic
auuuuaagacucguuggaa

SEQ ID NO: 755 - RNA, 19 nt, Artificial Sequence
  Synthetic
accccaggggcugagcuuu

SEQ ID NO: 756 - RNA, 19 nt, Artificial Sequence
  Synthetic
uugaagaaaaucuccucag

SEQ ID NO: 757 - RNA, 19 nt, Artificial Sequence
  Synthetic
gagucugcaagaaacuaua

SEQ ID NO: 758 - RNA, 19 nt, Artificial Sequence
  Synthetic
auucagucuuugacucaga

SEQ ID NO: 759 - RNA, 19 nt, Artificial Sequence
  Synthetic
augccgaagaugaacuuug

SEQ ID NO: 760 - RNA, 19 nt, Artificial Sequence
  Synthetic
gcgaauguauuuauuggug

SEQ ID NO: 761 - RNA, 19 nt, Artificial Sequence
  Synthetic
gccaauccccuggcugucg

SEQ ID NO: 762 - RNA, 19 nt, Artificial Sequence
  Synthetic
gacuugcuggagaagaugc

SEQ ID NO: 763 - RNA, 19 nt, Artificial Sequence
  Synthetic
cuuguauuggacucagaua

SEQ ID NO: 764 - RNA, 19 nt, Artificial Sequence
  Synthetic
aagagaauuacagcggccc

SEQ ID NO: 765 - RNA, 19 nt, Artificial Sequence
  Synthetic
caagcccuugcacaugccu

SEQ ID NO: 766 - RNA, 19 nt, Artificial Sequence
  Synthetic
uacuuugcucaguaccacg

SEQ ID NO: 767 - RNA, 19 nt, Artificial Sequence
  Synthetic
gauccugaugaugaaccag

SEQ ID NO: 768 - RNA, 19 nt, Artificial Sequence
  Synthetic
guggccgauccuuaugauc

SEQ ID NO: 769 - RNA, 19 nt, Artificial Sequence
  Synthetic
caguccuuugaaagcaggg

SEQ ID NO: 770 - RNA, 19 nt, Artificial Sequence
  Synthetic
gaccuccuuauagaugagu

SEQ ID NO: 771 - RNA, 19 nt, Artificial Sequence
  Synthetic
uggaaaagccugaccuaug

SEQ ID NO: 772 - RNA, 19 nt, Artificial Sequence
  Synthetic
gaugaagucaucagcuuug

SEQ ID NO: 773 - RNA, 19 nt, Artificial Sequence
  Synthetic
gugccaccaccccuugacc

SEQ ID NO: 774 - RNA, 19 nt, Artificial Sequence
  Synthetic
caagaagagauggaguccu

SEQ ID NO: 775 - RNA, 19 nt, Artificial Sequence
  Synthetic
ugagcaccugguuucuguu

SEQ ID NO: 776 - RNA, 19 nt, Artificial Sequence
  Synthetic
ucuguugaucccacuucac

SEQ ID NO: 777 - RNA, 19 nt, Artificial Sequence
  Synthetic
cugugaggggaaggccuuu

SEQ ID NO: 778 - RNA, 19 nt, Artificial Sequence
  Synthetic
uucacgggaacucuccaaa

SEQ ID NO: 779 - RNA, 19 nt, Artificial Sequence
  Synthetic
auauuauucaagugccucu

SEQ ID NO: 780 - RNA, 19 nt, Artificial Sequence
  Synthetic
uuguugcagagauuuccuc

SEQ ID NO: 781 - RNA, 19 nt, Artificial Sequence
  Synthetic
ccaugguggaagggggugu

SEQ ID NO: 782 - RNA, 19 nt, Artificial Sequence
  Synthetic
ugcgugcgugugcgugcgu

SEQ ID NO: 783 - RNA, 19 nt, Artificial Sequence
  Synthetic
uguuagugugugugcaugu

SEQ ID NO: 784 - RNA, 19 nt, Artificial Sequence
  Synthetic
ugugugucugucuuugugg

SEQ ID NO: 785 - RNA, 19 nt, Artificial Sequence
  Synthetic
ggaggguaagacaauauga

SEQ ID NO: 786 - RNA, 19 nt, Artificial Sequence
  Synthetic
aacaaacuaugaucacagu

SEQ ID NO: 787 - RNA, 19 nt, Artificial Sequence
  Synthetic
ugacuuuacaggagguugu

SEQ ID NO: 788 - RNA, 19 nt, Artificial Sequence
  Synthetic
uggaugcuccagggcagcc

SEQ ID NO: 789 - RNA, 19 nt, Artificial Sequence
  Synthetic
cuccaccuugcucuucuuu

SEQ ID NO: 790 - RNA, 19 nt, Artificial Sequence
  Synthetic
ucugagaguuggcucaggc

SEQ ID NO: 791 - RNA, 19 nt, Artificial Sequence
  Synthetic
cagacaagagcugcugucc

SEQ ID NO: 792 - RNA, 19 nt, Artificial Sequence
  Synthetic
cuuuuaggaauauguucaa

SEQ ID NO: 793 - RNA, 19 nt, Artificial Sequence
  Synthetic
augcaaaguaaaaaaauau

SEQ ID NO: 794 - RNA, 19 nt, Artificial Sequence
  Synthetic
ugaauuguccccaaucccg

SEQ ID NO: 795 - RNA, 19 nt, Artificial Sequence
  Synthetic
ggucaugcuuuugccacuu

SEQ ID NO: 796 - RNA, 19 nt, Artificial Sequence
  Synthetic
uuggcuucuccugugaccc

SEQ ID NO: 797 - RNA, 19 nt, Artificial Sequence
  Synthetic
ccaccuugacgguggggcg

SEQ ID NO: 798 - RNA, 19 nt, Artificial Sequence
  Synthetic
guagacuugacaacauccc

SEQ ID NO: 799 - RNA, 19 nt, Artificial Sequence
  Synthetic
cacaguggcacggagagaa

SEQ ID NO: 800 - RNA, 19 nt, Artificial Sequence
  Synthetic
aggcccauaccuucugguu

SEQ ID NO: 801 - RNA, 19 nt, Artificial Sequence
  Synthetic
ugcuucagaccugacaccg

SEQ ID NO: 802 - RNA, 19 nt, Artificial Sequence
  Synthetic
gucccucagugauacguac

SEQ ID NO: 803 - RNA, 19 nt, Artificial Sequence
  Synthetic
cagccaaaaaggaccaacu

SEQ ID NO: 804 - RNA, 19 nt, Artificial Sequence
  Synthetic
uggcuucugugcacuagcc

SEQ ID NO: 805 - RNA, 19 nt, Artificial Sequence
  Synthetic
cugugauuaacuugcuuag

SEQ ID NO: 806 - RNA, 19 nt, Artificial Sequence
  Synthetic
guaugguucucagaucuug

SEQ ID NO: 807 - RNA, 19 nt, Artificial Sequence
  Synthetic
gacaguauauuugaaacug

SEQ ID NO: 808 - RNA, 19 nt, Artificial Sequence
  Synthetic
guaaauauguuugugccuu

SEQ ID NO: 809 - RNA, 19 nt, Artificial Sequence
  Synthetic
uaaaaggagagaagaaagu

SEQ ID NO: 810 - RNA, 19 nt, Artificial Sequence
  Synthetic
uguagauaguuaaaagacu

SEQ ID NO: 811 - RNA, 19 nt, Artificial Sequence
  Synthetic
ugcagcugcugaaguucug

SEQ ID NO: 812 - RNA, 19 nt, Artificial Sequence
  Synthetic
gagccgggcaagucgagag

SEQ ID NO: 813 - RNA, 19 nt, Artificial Sequence
  Synthetic
gggcuguuggacagcugcu

SEQ ID NO: 814 - RNA, 19 nt, Artificial Sequence
  Synthetic
uugugggcccggaguaauc

SEQ ID NO: 815 - RNA, 19 nt, Artificial Sequence
  Synthetic
caggcagccuucauaggcg

SEQ ID NO: 816 - RNA, 19 nt, Artificial Sequence
  Synthetic
ggucaugugugcaugugag

SEQ ID NO: 817 - RNA, 19 nt, Artificial Sequence
  Synthetic
gcacaugcguauaugugcg

SEQ ID NO: 818 - RNA, 19 nt, Artificial Sequence
  Synthetic
gucucucuuucucccucac

SEQ ID NO: 819 - RNA, 19 nt, Artificial Sequence
  Synthetic
cccccagguguugccauuu

SEQ ID NO: 820 - RNA, 19 nt, Artificial Sequence
  Synthetic
ucucugcuuacccuucacc

SEQ ID NO: 821 - RNA, 19 nt, Artificial Sequence
  Synthetic
cuuuggugcagagguuucu

SEQ ID NO: 822 - RNA, 19 nt, Artificial Sequence
  Synthetic
uugaauaucugccccagua

SEQ ID NO: 823 - RNA, 19 nt, Artificial Sequence
  Synthetic
agucagaagcagguucuug

SEQ ID NO: 824 - RNA, 19 nt, Artificial Sequence
  Synthetic
gaugucauguacuuccugu

SEQ ID NO: 825 - RNA, 19 nt, Artificial Sequence
  Synthetic
uguacucuuuauuucuagc

SEQ ID NO: 826 - RNA, 19 nt, Artificial Sequence
  Synthetic
cagagugaggauguguuuu

SEQ ID NO: 827 - RNA, 19 nt, Artificial Sequence
  Synthetic
ugcacgucuugcuauuuga

SEQ ID NO: 828 - RNA, 19 nt, Artificial Sequence
  Synthetic
agcaugcacagcugcuugu

SEQ ID NO: 829 - RNA, 19 nt, Artificial Sequence
  Synthetic
uccugcucucuucaggagg

SEQ ID NO: 830 - RNA, 19 nt, Artificial Sequence
  Synthetic
gcccuggugucaggcaggu

SEQ ID NO: 831 - RNA, 19 nt, Artificial Sequence
  Synthetic
uuugccagugaagacuucu

SEQ ID NO: 832 - RNA, 19 nt, Artificial Sequence
  Synthetic
uuggguaguuuagauccca

SEQ ID NO: 833 - RNA, 19 nt, Artificial Sequence
  Synthetic
augucaccucagcugauau

SEQ ID NO: 834 - RNA, 19 nt, Artificial Sequence
  Synthetic
uuauggcaagugauaucac

SEQ ID NO: 835 - RNA, 19 nt, Artificial Sequence
  Synthetic
ccucucuucagccccuagu

SEQ ID NO: 836 - RNA, 19 nt, Artificial Sequence
  Synthetic
ugcuauucuguguugaaca

SEQ ID NO: 837 - RNA, 19 nt, Artificial Sequence
  Synthetic
acaauugauacuucaggug

SEQ ID NO: 838 - RNA, 19 nt, Artificial Sequence
  Synthetic
gcuuuugaugugaaaauca

SEQ ID NO: 839 - RNA, 19 nt, Artificial Sequence
  Synthetic
augaaaagaggaacaggug

SEQ ID NO: 840 - RNA, 19 nt, Artificial Sequence
  Synthetic
ggauguauagcauuuuuau

SEQ ID NO: 841 - RNA, 19 nt, Artificial Sequence
  Synthetic
uucaugccaucuguuuuca

SEQ ID NO: 842 - RNA, 19 nt, Artificial Sequence
  Synthetic
aaccaacuauuuuugagga

SEQ ID NO: 843 - RNA, 19 nt, Artificial Sequence
  Synthetic
aauuaucaugggaaaagac

SEQ ID NO: 844 - RNA, 19 nt, Artificial Sequence
  Synthetic
ccagggcuuuucccaggaa

SEQ ID NO: 845 - RNA, 19 nt, Artificial Sequence
  Synthetic
auaucccaaacuucggaaa

SEQ ID NO: 846 - RNA, 19 nt, Artificial Sequence
  Synthetic
acaaguuauucucuucacu

SEQ ID NO: 847 - RNA, 19 nt, Artificial Sequence
  Synthetic
ucccaauaacuaaugcuaa

SEQ ID NO: 848 - RNA, 19 nt, Artificial Sequence
  Synthetic
agaaaugcugaaaaucaaa

SEQ ID NO: 849 - RNA, 19 nt, Artificial Sequence
  Synthetic
aguaaaaaauuaaagccca

SEQ ID NO: 850 - RNA, 19 nt, Artificial Sequence
  Synthetic
auaaggccagaaacuccuu

SEQ ID NO: 851 - RNA, 19 nt, Artificial Sequence
  Synthetic
uuugcugucuuucucuaaa

SEQ ID NO: 852 - RNA, 19 nt, Artificial Sequence
  Synthetic
auaugauuacuuuaaaaua

SEQ ID NO: 853 - RNA, 19 nt, Artificial Sequence
  Synthetic
aaaaaaguaacaagguguc

SEQ ID NO: 854 - RNA, 19 nt, Artificial Sequence
  Synthetic
cuuuuccacuccuauggaa

SEQ ID NO: 855 - RNA, 19 nt, Artificial Sequence
  Synthetic
aaagggucuucuuggcagc

SEQ ID NO: 856 - RNA, 19 nt, Artificial Sequence
  Synthetic
cuuaacauugacuucuugg

SEQ ID NO: 857 - RNA, 19 nt, Artificial Sequence
  Synthetic
guuuggggagaaauaaauu

SEQ ID NO: 858 - RNA, 19 nt, Artificial Sequence
  Synthetic
uuuguuucagaauuuugua

SEQ ID NO: 859 - RNA, 19 nt, Artificial Sequence
  Synthetic
auauuguaggaaucccuuu

SEQ ID NO: 860 - RNA, 19 nt, Artificial Sequence
  Synthetic
ugagaaugugauuccuuuu

SEQ ID NO: 861 - RNA, 19 nt, Artificial Sequence
  Synthetic
ugauggggagaaagggcaa

SEQ ID NO: 862 - RNA, 19 nt, Artificial Sequence
  Synthetic
aauuauuuuaauauuuugu

SEQ ID NO: 863 - RNA, 19 nt, Artificial Sequence
  Synthetic
uauuuucaacuuuauaaag

SEQ ID NO: 864 - RNA, 19 nt, Artificial Sequence
  Synthetic
gauaaaauauccucagggg

SEQ ID NO: 865 - RNA, 19 nt, Artificial Sequence
  Synthetic
guggagaagugucguuuuc

SEQ ID NO: 866 - RNA, 19 nt, Artificial Sequence
  Synthetic
cauaacuugcugaauuuca

SEQ ID NO: 867 - RNA, 19 nt, Artificial Sequence
  Synthetic
aggcauuuuguucuacaug

SEQ ID NO: 868 - RNA, 19 nt, Artificial Sequence
  Synthetic
gaggacucauauauuuaag

SEQ ID NO: 869 - RNA, 19 nt, Artificial Sequence
  Synthetic
gccuuuuguguaauaagaa

SEQ ID NO: 870 - RNA, 19 nt, Artificial Sequence
  Synthetic
aaguauaaagucacuucca

SEQ ID NO: 871 - RNA, 19 nt, Artificial Sequence
  Synthetic
aguguuggcugugugacag

SEQ ID NO: 872 - RNA, 19 nt, Artificial Sequence
  Synthetic
gaaucuuguauuugggcca

SEQ ID NO: 873 - RNA, 19 nt, Artificial Sequence
  Synthetic
aagguguuuccauuucuca

SEQ ID NO: 874 - RNA, 19 nt, Artificial Sequence
  Synthetic
aaucagugcagugauacau

SEQ ID NO: 875 - RNA, 19 nt, Artificial Sequence
  Synthetic
uguacuccagagggacagg

SEQ ID NO: 876 - RNA, 19 nt, Artificial Sequence
  Synthetic
gguggacccccugagucaa

SEQ ID NO: 877 - RNA, 19 nt, Artificial Sequence
  Synthetic
acuggagcaagaaggaagg

SEQ ID NO: 878 - RNA, 19 nt, Artificial Sequence
  Synthetic
gaggcagacugauggcgau

SEQ ID NO: 879 - RNA, 19 nt, Artificial Sequence
  Synthetic
uucccucucacccgggacu

SEQ ID NO: 880 - RNA, 19 nt, Artificial Sequence
  Synthetic
ucucccccuuucaaggaaa

SEQ ID NO: 881 - RNA, 19 nt, Artificial Sequence
  Synthetic
agugaaccuuuaaaguaaa

SEQ ID NO: 882 - RNA, 19 nt, Artificial Sequence
  Synthetic
aggccucaucuccuuuauu

SEQ ID NO: 883 - RNA, 19 nt, Artificial Sequence
  Synthetic
ugcaguucaaauccucacc

SEQ ID NO: 884 - RNA, 19 nt, Artificial Sequence
  Synthetic
cauccacagcaagaugaau

SEQ ID NO: 885 - RNA, 19 nt, Artificial Sequence
  Synthetic
uuuuaucagccauguuugg

SEQ ID NO: 886 - RNA, 19 nt, Artificial Sequence
  Synthetic
guuguaaaugcucguguga

SEQ ID NO: 887 - RNA, 19 nt, Artificial Sequence
  Synthetic
auuuccuacagaaauacug

SEQ ID NO: 888 - RNA, 19 nt, Artificial Sequence
  Synthetic
gcucugaauauuuuguaau

SEQ ID NO: 889 - RNA, 19 nt, Artificial Sequence
  Synthetic
uaaaggucuuugcacaugu

SEQ ID NO: 890 - RNA, 19 nt, Artificial Sequence
  Synthetic
ugaccacauacguguuagg

SEQ ID NO: 891 - RNA, 19 nt, Artificial Sequence
  Synthetic
gaggcugcaugcucuggaa

SEQ ID NO: 892 - RNA, 19 nt, Artificial Sequence
  Synthetic
agccuggacucuaagcugg

SEQ ID NO: 893 - RNA, 19 nt, Artificial Sequence
  Synthetic
gagcucuuggaagagcucu

SEQ ID NO: 894 - RNA, 19 nt, Artificial Sequence
  Synthetic
uucgguuucugagcauaau

SEQ ID NO: 895 - RNA, 19 nt, Artificial Sequence
  Synthetic
ugcucccaucuccugauuu

SEQ ID NO: 896 - RNA, 19 nt, Artificial Sequence
  Synthetic
ucucugaacagaaaacaaa

SEQ ID NO: 897 - RNA, 19 nt, Artificial Sequence
  Synthetic
aagagagaaugagggaaau

SEQ ID NO: 898 - RNA, 19 nt, Artificial Sequence
  Synthetic
uugcuauuuuauuuguauu

SEQ ID NO: 899 - RNA, 19 nt, Artificial Sequence
  Synthetic
ucaugaacuuggcuguaau

SEQ ID NO: 900 - RNA, 19 nt, Artificial Sequence
  Synthetic
ucaguuaugccguauagga

SEQ ID NO: 901 - RNA, 19 nt, Artificial Sequence
  Synthetic
augucagacaauaccacug

SEQ ID NO: 902 - RNA, 19 nt, Artificial Sequence
  Synthetic
gguuaaaauaaagccuauu

SEQ ID NO: 903 - RNA, 19 nt, Artificial Sequence
  Synthetic
uaaagccuauuuuucaaau

SEQ ID NO: 904 - RNA, 19 nt, Artificial Sequence
  Synthetic
ggcuccaguggucgcgguu

SEQ ID NO: 905 - RNA, 19 nt, Artificial Sequence
  Synthetic
agcugcugcgcccgcuaag

SEQ ID NO: 906 - RNA, 19 nt, Artificial Sequence
  Synthetic
ucgcaguacucccguucca

SEQ ID NO: 907 - RNA, 19 nt, Artificial Sequence
  Synthetic
ggccgacuccgggcugcgu

SEQ ID NO: 908 - RNA, 19 nt, Artificial Sequence
  Synthetic
gcaccuucgccccuacaag

SEQ ID NO: 909 - RNA, 19 nt, Artificial Sequence
  Synthetic
gcccgccgcgaucucccug

SEQ ID NO: 910 - RNA, 19 nt, Artificial Sequence
  Synthetic
uccggcgcucaagacugcg

SEQ ID NO: 911 - RNA, 19 nt, Artificial Sequence
  Synthetic
cuaagggcagggacgcgcu

SEQ ID NO: 912 - RNA, 19 nt, Artificial Sequence
  Synthetic
cgacuggggcaagccccgc

SEQ ID NO: 913 - RNA, 19 nt, Artificial Sequence
  Synthetic
cggcuggaugugccccugc

SEQ ID NO: 914 - RNA, 19 nt, Artificial Sequence
  Synthetic
ggcugcugucagccgcagc

SEQ ID NO: 915 - RNA, 19 nt, Artificial Sequence
  Synthetic
gcagacucccgcgcgcgcg

SEQ ID NO: 916 - RNA, 19 nt, Artificial Sequence
  Synthetic
ugcggcugccgcgaccccg

SEQ ID NO: 917 - RNA, 19 nt, Artificial Sequence
  Synthetic
gcuggucgcccgcgcaggu

SEQ ID NO: 918 - RNA, 19 nt, Artificial Sequence
  Synthetic
gccgggcggggaccuugcg

SEQ ID NO: 919 - RNA, 19 nt, Artificial Sequence
  Synthetic
gcccuugcugcccgcccag

SEQ ID NO: 920 - RNA, 19 nt, Artificial Sequence
  Synthetic
acccgcacccucuccccgg

SEQ ID NO: 921 - RNA, 19 nt, Artificial Sequence
  Synthetic
uguggggcccccgccugca

SEQ ID NO: 922 - RNA, 19 nt, Artificial Sequence
  Synthetic
cgggcaagaagguggcccu

SEQ ID NO: 923 - RNA, 19 nt, Artificial Sequence
  Synthetic
uuuuccagcggcagccgcc

SEQ ID NO: 924 - RNA, 19 nt, Artificial Sequence
  Synthetic
ugggccucuccugagacau

SEQ ID NO: 925 - RNA, 19 nt, Artificial Sequence
  Synthetic
gcuccugccgguagaacgu

SEQ ID NO: 926 - RNA, 19 nt, Artificial Sequence
  Synthetic
cccagauugucuuguucag

SEQ ID NO: 927 - RNA, 19 nt, Artificial Sequence
  Synthetic
gguaacgcucgggcaccuc

SEQ ID NO: 928 - RNA, 19 nt, Artificial Sequence
  Synthetic
ccacuggagacagguucug

SEQ ID NO: 929 - RNA, 19 nt, Artificial Sequence
  Synthetic
agccauaggcgccagagcc

SEQ ID NO: 930 - RNA, 19 nt, Artificial Sequence
  Synthetic
caaaagcagcacacacaga

SEQ ID NO: 931 - RNA, 19 nt, Artificial Sequence
  Synthetic
guaaccccguuuuuguguc

SEQ ID NO: 932 - RNA, 19 nt, Artificial Sequence
  Synthetic
gcuucuucacugccacacg

SEQ ID NO: 933 - RNA, 19 nt, Artificial Sequence
  Synthetic
acugaaauggucuggagag

SEQ ID NO: 934 - RNA, 19 nt, Artificial Sequence
  Synthetic
uuuucgcaugaaugaugga

SEQ ID NO: 935 - RNA, 19 nt, Artificial Sequence
  Synthetic
gcaguucucuguagguucu

SEQ ID NO: 936 - RNA, 19 nt, Artificial Sequence
  Synthetic
ucauauguuuaaguaaccg

SEQ ID NO: 937 - RNA, 19 nt, Artificial Sequence
  Synthetic
caaucacauuuucauguuu

SEQ ID NO: 938 - RNA, 19 nt, Artificial Sequence
  Synthetic
uaaaaacguccaacagacc

SEQ ID NO: 939 - RNA, 19 nt, Artificial Sequence
  Synthetic
ccagagaccuugcaggugu

SEQ ID NO: 940 - RNA, 19 nt, Artificial Sequence
  Synthetic
acacaucauugaauuccuc

SEQ ID NO: 941 - RNA, 19 nt, Artificial Sequence
  Synthetic
ugagaugggucaccagaua

SEQ ID NO: 942 - RNA, 19 nt, Artificial Sequence
  Synthetic
uguucagaucugcccccau

SEQ ID NO: 943 - RNA, 19 nt, Artificial Sequence
  Synthetic
ucugacauuucacaauguu

SEQ ID NO: 944 - RNA, 19 nt, Artificial Sequence
  Synthetic
cauggucaucuguaagcuu

SEQ ID NO: 945 - RNA, 19 nt, Artificial Sequence
  Synthetic
gguagauaaggaacugaac

SEQ ID NO: 946 - RNA, 19 nt, Artificial Sequence
  Synthetic
uuagaccucggagaauuug

SEQ ID NO: 947 - RNA, 19 nt, Artificial Sequence
  Synthetic
cagcugaauguauauacuu

SEQ ID NO: 948 - RNA, 19 nt, Artificial Sequence
  Synthetic
ggucccugugaauuauguc

SEQ ID NO: 949 - RNA, 19 nt, Artificial Sequence
  Synthetic
cuagauuacuagguuuuag

SEQ ID NO: 950 - RNA, 19 nt, Artificial Sequence
  Synthetic
cacagucuucauucacagc

SEQ ID NO: 951 - RNA, 19 nt, Artificial Sequence
  Synthetic
aauccagaaucuucagcuc

SEQ ID NO: 952 - RNA, 19 nt, Artificial Sequence
  Synthetic
ugugccgagccaguccaaa

SEQ ID NO: 953 - RNA, 19 nt, Artificial Sequence
  Synthetic
cugucauuucaucaucugu

SEQ ID NO: 954 - RNA, 19 nt, Artificial Sequence
  Synthetic
accuaguggccacguagcc

SEQ ID NO: 955 - RNA, 19 nt, Artificial Sequence
  Synthetic
ucucaggagcccuguacca

SEQ ID NO: 956 - RNA, 19 nt, Artificial Sequence
  Synthetic
gcauccaguucagcaugau

SEQ ID NO: 957 - RNA, 19 nt, Artificial Sequence
  Synthetic
caacugucugguuguaaug

SEQ ID NO: 958 - RNA, 19 nt, Artificial Sequence
  Synthetic
aucccacugaccaaauauc

SEQ ID NO: 959 - RNA, 19 nt, Artificial Sequence
  Synthetic
acagcucggccauuaugca

SEQ ID NO: 960 - RNA, 19 nt, Artificial Sequence
  Synthetic
acaauguucuuccagucaa

SEQ ID NO: 961 - RNA, 19 nt, Artificial Sequence
  Synthetic
uauggucuguaccaggaaa

SEQ ID NO: 962 - RNA, 19 nt, Artificial Sequence
  Synthetic
ugagcuucaacugaucaau

SEQ ID NO: 963 - RNA, 19 nt, Artificial Sequence
  Synthetic
uuccaacgagucuuaaaau

SEQ ID NO: 964 - RNA, 19 nt, Artificial Sequence
  Synthetic
aaagcucagccccuggggu

SEQ ID NO: 965 - RNA, 19 nt, Artificial Sequence
  Synthetic
cugaggagauuuucuucaa

SEQ ID NO: 966 - RNA, 19 nt, Artificial Sequence
  Synthetic
uauaguuucuugcagacuc

SEQ ID NO: 967 - RNA, 19 nt, Artificial Sequence
  Synthetic
ucugagucaaagacugaau

SEQ ID NO: 968 - RNA, 19 nt, Artificial Sequence
  Synthetic
caaaguucaucuucggcau

SEQ ID NO: 969 - RNA, 19 nt, Artificial Sequence
  Synthetic
caccaauaaauacauucgc

SEQ ID NO: 970 - RNA, 19 nt, Artificial Sequence
  Synthetic
cgacagccaggggauuggc

SEQ ID NO: 971 - RNA, 19 nt, Artificial Sequence
  Synthetic
gcaucuucuccagcaaguc

SEQ ID NO: 972 - RNA, 19 nt, Artificial Sequence
  Synthetic
uaucugaguccaauacaag

SEQ ID NO: 973 - RNA, 19 nt, Artificial Sequence
  Synthetic
gggccgcuguaauucucuu

SEQ ID NO: 974 - RNA, 19 nt, Artificial Sequence
  Synthetic
aggcaugugcaagggcuug

SEQ ID NO: 975 - RNA, 19 nt, Artificial Sequence
  Synthetic
cgugguacugagcaaagua

SEQ ID NO: 976 - RNA, 19 nt, Artificial Sequence
  Synthetic
cugguucaucaucaggauc

SEQ ID NO: 977 - RNA, 19 nt, Artificial Sequence
  Synthetic
gaucauaaggaucggccac

SEQ ID NO: 978 - RNA, 19 nt, Artificial Sequence
  Synthetic
cccugcuuucaaaggacug

SEQ ID NO: 979 - RNA, 19 nt, Artificial Sequence
  Synthetic
acucaucuauaaggagguc

SEQ ID NO: 980 - RNA, 19 nt, Artificial Sequence
  Synthetic
cauaggucaggcuuuucca

SEQ ID NO: 981 - RNA, 19 nt, Artificial Sequence
  Synthetic
caaagcugaugacuucauc

SEQ ID NO: 982 - RNA, 19 nt, Artificial Sequence
  Synthetic
ggucaaggggugguggcac

SEQ ID NO: 983 - RNA, 19 nt, Artificial Sequence
  Synthetic
aggacuccaucucuucuug

SEQ ID NO: 984 - RNA, 19 nt, Artificial Sequence
  Synthetic
aacagaaaccaggugcuca

SEQ ID NO: 985 - RNA, 19 nt, Artificial Sequence
  Synthetic
gugaagugggaucaacaga

SEQ ID NO: 986 - RNA, 19 nt, Artificial Sequence
  Synthetic
aaaggccuuccccucacag

SEQ ID NO: 987 - RNA, 19 nt, Artificial Sequence
  Synthetic
uuuggagaguucccgugaa

SEQ ID NO: 988 - RNA, 19 nt, Artificial Sequence
  Synthetic
agaggcacuugaauaauau

SEQ ID NO: 989 - RNA, 19 nt, Artificial Sequence
  Synthetic
gaggaaaucucugcaacaa

SEQ ID NO: 990 - RNA, 19 nt, Artificial Sequence
  Synthetic
acacccccuuccaccaugg

SEQ ID NO: 991 - RNA, 19 nt, Artificial Sequence
  Synthetic
acgcacgcacacgcacgca

SEQ ID NO: 992 - RNA, 19 nt, Artificial Sequence
  Synthetic
acaugcacacacacuaaca

SEQ ID NO: 993 - RNA, 19 nt, Artificial Sequence
  Synthetic
ccacaaagacagacacaca

SEQ ID NO: 994 - RNA, 19 nt, Artificial Sequence
  Synthetic
ucauauugucuuacccucc

SEQ ID NO: 995 - RNA, 19 nt, Artificial Sequence
  Synthetic
acugugaucauaguuuguu

SEQ ID NO: 996 - RNA, 19 nt, Artificial Sequence
  Synthetic
acaaccuccuguaaaguca

SEQ ID NO: 997 - RNA, 19 nt, Artificial Sequence
  Synthetic
ggcugcccuggagcaucca

SEQ ID NO: 998 - RNA, 19 nt, Artificial Sequence
  Synthetic
aaagaagagcaagguggag

SEQ ID NO: 999 - RNA, 19 nt, Artificial Sequence
  Synthetic
gccugagccaacucucaga

SEQ ID NO: 1000 - RNA, 19 nt, Artificial Sequence
  Synthetic
ggacagcagcucuugucug

SEQ ID NO: 1001 - RNA, 19 nt, Artificial Sequence
  Synthetic
uugaacauauuccuaaaag

SEQ ID NO: 1002 - RNA, 19 nt, Artificial Sequence
  Synthetic
auauuuuuuuacuuugcau

SEQ ID NO: 1003 - RNA, 19 nt, Artificial Sequence
  Synthetic
cgggauuggggacaauuca

SEQ ID NO: 1004 - RNA, 19 nt, Artificial Sequence
  Synthetic
aaguggcaaaagcaugacc

SEQ ID NO: 1005 - RNA, 19 nt, Artificial Sequence
  Synthetic
gggucacaggagaagccaa

SEQ ID NO: 1006 - RNA, 19 nt, Artificial Sequence
  Synthetic
cgccccaccgucaaggugg

SEQ ID NO: 1007 - RNA, 19 nt, Artificial Sequence
  Synthetic
gggauguugucaagucuac

SEQ ID NO: 1008 - RNA, 19 nt, Artificial Sequence
  Synthetic
uucucuccgugccacugug

SEQ ID NO: 1009 - RNA, 19 nt, Artificial Sequence
  Synthetic
aaccagaagguaugggccu

SEQ ID NO: 1010 - RNA, 19 nt, Artificial Sequence
  Synthetic
cggugucaggucugaagca

SEQ ID NO: 1011 - RNA, 19 nt, Artificial Sequence
  Synthetic
guacguaucacugagggac

SEQ ID NO: 1012 - RNA, 19 nt, Artificial Sequence
  Synthetic
aguugguccuuuuuggcug

SEQ ID NO: 1013 - RNA, 19 nt, Artificial Sequence
  Synthetic
ggcuagugcacagaagcca

SEQ ID NO: 1014 - RNA, 19 nt, Artificial Sequence
  Synthetic
cuaagcaaguuaaucacag

SEQ ID NO: 1015 - RNA, 19 nt, Artificial Sequence
  Synthetic
caagaucugagaaccauac

SEQ ID NO: 1016 - RNA, 19 nt, Artificial Sequence
  Synthetic
caguuucaaauauacuguc

SEQ ID NO: 1017 - RNA, 19 nt, Artificial Sequence
  Synthetic
aaggcacaaacauauuuac

SEQ ID NO: 1018 - RNA, 19 nt, Artificial Sequence
  Synthetic
acuuucuucucuccuuuua

SEQ ID NO: 1019 - RNA, 19 nt, Artificial Sequence
  Synthetic
agucuuuuaacuaucuaca

SEQ ID NO: 1020 - RNA, 19 nt, Artificial Sequence
  Synthetic
cagaacuucagcagcugca

SEQ ID NO: 1021 - RNA, 19 nt, Artificial Sequence
  Synthetic
cucucgacuugcccggcuc

SEQ ID NO: 1022 - RNA, 19 nt, Artificial Sequence
  Synthetic
agcagcuguccaacagccc

SEQ ID NO: 1023 - RNA, 19 nt, Artificial Sequence
  Synthetic
gauuacuccgggcccacaa

SEQ ID NO: 1024 - RNA, 19 nt, Artificial Sequence
  Synthetic
cgccuaugaaggcugccug

SEQ ID NO: 1025 - RNA, 19 nt, Artificial Sequence
  Synthetic
cucacaugcacacaugacc

SEQ ID NO: 1026 - RNA, 19 nt, Artificial Sequence
  Synthetic
cgcacauauacgcaugugc

SEQ ID NO: 1027 - RNA, 19 nt, Artificial Sequence
  Synthetic
gugagggagaaagagagac

SEQ ID NO: 1028 - RNA, 19 nt, Artificial Sequence
  Synthetic
aaauggcaacaccuggggg

SEQ ID NO: 1029 - RNA, 19 nt, Artificial Sequence
  Synthetic
ggugaaggguaagcagaga

SEQ ID NO: 1030 - RNA, 19 nt, Artificial Sequence
  Synthetic
agaaaccucugcaccaaag

SEQ ID NO: 1031 - RNA, 19 nt, Artificial Sequence
  Synthetic
uacuggggcagauauucaa

SEQ ID NO: 1032 - RNA, 19 nt, Artificial Sequence
  Synthetic
caagaaccugcuucugacu

SEQ ID NO: 1033 - RNA, 19 nt, Artificial Sequence
  Synthetic
acaggaaguacaugacauc

SEQ ID NO: 1034 - RNA, 19 nt, Artificial Sequence
  Synthetic
gcuagaaauaaagaguaca

SEQ ID NO: 1035 - RNA, 19 nt, Artificial Sequence
  Synthetic
aaaacacauccucacucug

SEQ ID NO: 1036 - RNA, 19 nt, Artificial Sequence
  Synthetic
ucaaauagcaagacgugca

SEQ ID NO: 1037 - RNA, 19 nt, Artificial Sequence
  Synthetic
acaagcagcugugcaugcu

SEQ ID NO: 1038 - RNA, 19 nt, Artificial Sequence
  Synthetic
ccuccugaagagagcagga

SEQ ID NO: 1039 - RNA, 19 nt, Artificial Sequence
  Synthetic
accugccugacaccagggc

SEQ ID NO: 1040 - RNA, 19 nt, Artificial Sequence
  Synthetic
agaagucuucacuggcaaa

SEQ ID NO: 1041 - RNA, 19 nt, Artificial Sequence
  Synthetic
ugggaucuaaacuacccaa

SEQ ID NO: 1042 - RNA, 19 nt, Artificial Sequence
  Synthetic
auaucagcugaggugacau

SEQ ID NO: 1043 - RNA, 19 nt, Artificial Sequence
  Synthetic
gugauaucacuugccauaa

SEQ ID NO: 1044 - RNA, 19 nt, Artificial Sequence
  Synthetic
acuaggggcugaagagagg

SEQ ID NO: 1045 - RNA, 19 nt, Artificial Sequence
  Synthetic
uguucaacacagaauagca

SEQ ID NO: 1046 - RNA, 19 nt, Artificial Sequence
  Synthetic
caccugaaguaucaauugu

SEQ ID NO: 1047 - RNA, 19 nt, Artificial Sequence
  Synthetic
ugauuuucacaucaaaagc

SEQ ID NO: 1048 - RNA, 19 nt, Artificial Sequence
  Synthetic
caccuguuccucuuuucau

SEQ ID NO: 1049 - RNA, 19 nt, Artificial Sequence
  Synthetic
auaaaaaugcuauacaucc

SEQ ID NO: 1050 - RNA, 19 nt, Artificial Sequence
  Synthetic
ugaaaacagauggcaugaa

SEQ ID NO: 1051 - RNA, 19 nt, Artificial Sequence
  Synthetic
uccucaaaaauaguugguu

SEQ ID NO: 1052 - RNA, 19 nt, Artificial Sequence
  Synthetic
gucuuuucccaugauaauu

SEQ ID NO: 1053 - RNA, 19 nt, Artificial Sequence
  Synthetic
uuccugggaaaagcccugg

SEQ ID NO: 1054 - RNA, 19 nt, Artificial Sequence
  Synthetic
uuuccgaaguuugggauau

SEQ ID NO: 1055 - RNA, 19 nt, Artificial Sequence
  Synthetic
agugaagagaauaacuugu

SEQ ID NO: 1056 - RNA, 19 nt, Artificial Sequence
  Synthetic
uuagcauuaguuauuggga

SEQ ID NO: 1057 - RNA, 19 nt, Artificial Sequence
  Synthetic
uuugauuuucagcauuucu

SEQ ID NO: 1058 - RNA, 19 nt, Artificial Sequence
  Synthetic
ugggcuuuaauuuuuuacu

SEQ ID NO: 1059 - RNA, 19 nt, Artificial Sequence
  Synthetic
aaggaguuucuggccuuau

SEQ ID NO: 1060 - RNA, 19 nt, Artificial Sequence
  Synthetic
uuuagagaaagacagcaaa

SEQ ID NO: 1061 - RNA, 19 nt, Artificial Sequence
  Synthetic
uauuuuaaaguaaucauau

SEQ ID NO: 1062 - RNA, 19 nt, Artificial Sequence
  Synthetic
gacaccuuguuacuuuuuu

SEQ ID NO: 1063 - RNA, 19 nt, Artificial Sequence
  Synthetic
uuccauaggaguggaaaag

SEQ ID NO: 1064 - RNA, 19 nt, Artificial Sequence
  Synthetic
gcugccaagaagacccuuu

SEQ ID NO: 1065 - RNA, 19 nt, Artificial Sequence
  Synthetic
ccaagaagucaauguuaag

SEQ ID NO: 1066 - RNA, 19 nt, Artificial Sequence
  Synthetic
aauuuauuucuccccaaac

SEQ ID NO: 1067 - RNA, 19 nt, Artificial Sequence
  Synthetic
uacaaaauucugaaacaaa

SEQ ID NO: 1068 - RNA, 19 nt, Artificial Sequence
  Synthetic
aaagggauuccuacaauau

SEQ ID NO: 1069 - RNA, 19 nt, Artificial Sequence
  Synthetic
aaaaggaaucacauucuca

SEQ ID NO: 1070 - RNA, 19 nt, Artificial Sequence
  Synthetic
uugcccuuucuccccauca

SEQ ID NO: 1071 - RNA, 19 nt, Artificial Sequence
  Synthetic
acaaaauauuaaaauaauu

SEQ ID NO: 1072 - RNA, 19 nt, Artificial Sequence
  Synthetic
cuuuauaaaguugaaaaua

SEQ ID NO: 1073 - RNA, 19 nt, Artificial Sequence
  Synthetic
ccccugaggauauuuuauc

SEQ ID NO: 1074 - RNA, 19 nt, Artificial Sequence
  Synthetic
gaaaacgacacuucuccac

SEQ ID NO: 1075 - RNA, 19 nt, Artificial Sequence
  Synthetic
ugaaauucagcaaguuaug

SEQ ID NO: 1076 - RNA, 19 nt, Artificial Sequence
  Synthetic
cauguagaacaaaaugccu

SEQ ID NO: 1077 - RNA, 19 nt, Artificial Sequence
  Synthetic
cuuaaauauaugaguccuc

SEQ ID NO: 1078 - RNA, 19 nt, Artificial Sequence
  Synthetic
uucuuauuacacaaaaggc

SEQ ID NO: 1079 - RNA, 19 nt, Artificial Sequence
  Synthetic
uggaagugacuuuauacuu

SEQ ID NO: 1080 - RNA, 19 nt, Artificial Sequence
  Synthetic
cugucacacagccaacacu

SEQ ID NO: 1081 - RNA, 19 nt, Artificial Sequence
  Synthetic
uggcccaaauacaagauuc

SEQ ID NO: 1082 - RNA, 19 nt, Artificial Sequence
  Synthetic
ugagaaauggaaacaccuu

SEQ ID NO: 1083 - RNA, 19 nt, Artificial Sequence
  Synthetic
auguaucacugcacugauu

SEQ ID NO: 1084 - RNA, 19 nt, Artificial Sequence
  Synthetic
ccugucccucuggaguaca

SEQ ID NO: 1085 - RNA, 19 nt, Artificial Sequence
  Synthetic
uugacucaggggguccacc

SEQ ID NO: 1086 - RNA, 19 nt, Artificial Sequence
  Synthetic
ccuuccuucuugcuccagu

SEQ ID NO: 1087 - RNA, 19 nt, Artificial Sequence
  Synthetic
aucgccaucagucugccuc

SEQ ID NO: 1088 - RNA, 19 nt, Artificial Sequence
  Synthetic
agucccgggugagagggaa

SEQ ID NO: 1089 - RNA, 19 nt, Artificial Sequence
  Synthetic
uuuccuugaaagggggaga

SEQ ID NO: 1090 - RNA, 19 nt, Artificial Sequence
  Synthetic
uuuacuuuaaagguucacu

SEQ ID NO: 1091 - RNA, 19 nt, Artificial Sequence
  Synthetic
aauaaaggagaugaggccu

SEQ ID NO: 1092 - RNA, 19 nt, Artificial Sequence
  Synthetic
ggugaggauuugaacugca

SEQ ID NO: 1093 - RNA, 19 nt, Artificial Sequence
  Synthetic
auucaucuugcuguggaug

SEQ ID NO: 1094 - RNA, 19 nt, Artificial Sequence
  Synthetic
ccaaacauggcugauaaaa

SEQ ID NO: 1095 - RNA, 19 nt, Artificial Sequence
  Synthetic
ucacacgagcauuuacaac

SEQ ID NO: 1096 - RNA, 19 nt, Artificial Sequence
  Synthetic
caguauuucuguaggaaau

SEQ ID NO: 1097 - RNA, 19 nt, Artificial Sequence
  Synthetic
auuacaaaauauucagagc

SEQ ID NO: 1098 - RNA, 19 nt, Artificial Sequence
  Synthetic
acaugugcaaagaccuuua

SEQ ID NO: 1099 - RNA, 19 nt, Artificial Sequence
  Synthetic
ccuaacacguaugugguca

SEQ ID NO: 1100 - RNA, 19 nt, Artificial Sequence
  Synthetic
uuccagagcaugcagccuc

SEQ ID NO: 1101 - RNA, 19 nt, Artificial Sequence
  Synthetic
ccagcuuagaguccaggcu

SEQ ID NO: 1102 - RNA, 19 nt, Artificial Sequence
  Synthetic
agagcucuuccaagagcuc

SEQ ID NO: 1103 - RNA, 19 nt, Artificial Sequence
  Synthetic
auuaugcucagaaaccgaa

SEQ ID NO: 1104 - RNA, 19 nt, Artificial Sequence
  Synthetic
aaaucaggagaugggagca

SEQ ID NO: 1105 - RNA, 19 nt, Artificial Sequence
  Synthetic
uuuguuuucuguucagaga

SEQ ID NO: 1106 - RNA, 19 nt, Artificial Sequence
  Synthetic
auuucccucauucucucuu

SEQ ID NO: 1107 - RNA, 19 nt, Artificial Sequence
  Synthetic
aauacaaauaaaauagcaa

SEQ ID NO: 1108 - RNA, 19 nt, Artificial Sequence
  Synthetic
auuacagccaaguucauga

SEQ ID NO: 1109 - RNA, 19 nt, Artificial Sequence
  Synthetic
uccuauacggcauaacuga

SEQ ID NO: 1110 - RNA, 19 nt, Artificial Sequence
  Synthetic
cagugguauugucugacau

SEQ ID NO: 1111 - RNA, 19 nt, Artificial Sequence
  Synthetic
aauaggcuuuauuuuaacc

SEQ ID NO: 1112 - RNA, 19 nt, Artificial Sequence
  Synthetic
auuugaaaaauaggcuuua

SEQ ID NO: 1113 - RNA, 23 nt, Artificial Sequence
  Synthetic
accagaccuacugccagagaacc

SEQ ID NO: 1114 - RNA, 23 nt, Artificial Sequence
  Synthetic
aucacacaggguuccugacagaa

SEQ ID NO: 1115 - RNA, 23 nt, Artificial Sequence
  Synthetic
uuggcucuagucacuggcaucuc

SEQ ID NO: 1116 - RNA, 23 nt, Artificial Sequence
  Synthetic
acuguggaguugacucgguguuc

SEQ ID NO: 1117 - RNA, 23 nt, Artificial Sequence
  Synthetic
ccuucgaacaucagaccuacugc

SEQ ID NO: 1118 - RNA, 23 nt, Artificial Sequence
  Synthetic
ugaacuccaagggcuauaccaag

SEQ ID NO: 1119 - RNA, 23 nt, Artificial Sequence
  Synthetic
agggcuauaccaaguccaucgac

SEQ ID NO: 1120 - RNA, 23 nt, Artificial Sequence
  Synthetic
uucuguguguggugagcagaagu

SEQ ID NO: 1121 - RNA, 23 nt, Artificial Sequence
  Synthetic
aacagcuuggaacaccauguccu

SEQ ID NO: 1122 - RNA, 23 nt, Artificial Sequence
  Synthetic
uuuucccagcugacucagaacac

SEQ ID NO: 1123 - RNA, 23 nt, Artificial Sequence
  Synthetic
caaugucaacagauccgacuuug

SEQ ID NO: 1124 - RNA, 23 nt, Artificial Sequence
  Synthetic
cuuuggccucugauacagacagc

SEQ ID NO: 1125 - RNA, 23 nt, Artificial Sequence
  Synthetic
gccuacuuugcucaguaccacga

SEQ ID NO: 1126 - RNA, 23 nt, Artificial Sequence
  Synthetic
ugucugucuuugugggaggguaa

SEQ ID NO: 1127 - RNA, 23 nt, Artificial Sequence
  Synthetic
aaaagggucuucuuggcagcuua

SEQ ID NO: 1128 - RNA, 23 nt, Artificial Sequence
  Synthetic
ggacucuaagcuggagcucuugg

SEQ ID NO: 1129 - DNA, 21 bp, Artificial Sequence
  Synthetic
  misc_feature (1)..(19): ribonucleotide unmodified or modified as described for this sequence
cagaccuacugccagagaatt

SEQ ID NO: 1130 - DNA, 21 bp, Artificial Sequence
  misc_feature (1)..(19): ribonucleotide unmodified or modified as described for this sequence
  Synthetic
cacacaggguuccugacagtt

SEQ ID NO: 1131 - DNA, 21 bp, Artificial Sequence
  Synthetic
  misc_feature (1)..(19): ribonucleotide unmodified or modified as described for this sequence
ggcucuagucacuggcauctt

SEQ ID NO: 1132 - DNA, 21 bp, Artificial Sequence
  Synthetic
  misc_feature (1)..(19): ribonucleotide unmodified or modified as described for this sequence
uguggaguugacucggugutt

SEQ ID NO: 1133 - DNA, 21 bp, Artificial Sequence
  Synthetic
  misc_feature (1)..(19): ribonucleotide unmodified or modified as described for this sequence
uucucuggcaguaggucugtt

SEQ ID NO: 1134 - DNA, 21 bp, Artificial Sequence
  Synthetic
  misc_feature (1)..(19): ribonucleotide unmodified or modified as described for this sequence
cugucaggaacccugugugtt

SEQ ID NO: 1135 - DNA, 21 bp, Artificial Sequence
  Synthetic
  misc_feature (1)..(19): ribonucleotide unmodified or modified as described for this sequence
gaugccagugacuagagcctt

SEQ ID NO: 1136 - DNA, 21 bp, Artificial Sequence
  Synthetic
  misc_feature (1)..(19): ribonucleotide unmodified or modified as described for this sequence
acaccgagucaacuccacatt

SEQ ID NO: 1137 - DNA, 21 bp, Artificial Sequence
  Synthetic
  misc_feature (1)..(1): 5'-3 attached terminal deoxyabasic moiety
  misc_feature (21)..(21): 3'-3 attached terminal deoxyabasic moiety
  misc_feature (1)..(1): 2'-deoxy-2'-fluoro cytidine
  misc_feature (5)..(6): 2'-deoxy-2'-fluoro cytidine
  misc_feature (9)..(9): 2'-deoxy-2'-fluoro cytidine
  misc_feature (12)..(13): 2'-deoxy-2'-fluoro cytidine
  misc_feature (7)..(7): 2'-deoxy-2'-fluoro uridine
  misc_feature (10)..(10): 2'-deoxy-2'-fluoro uridine
  misc_feature (1)..(19): ribonucleotide unmodified or modified as described for this sequence
cagaccuacugccagagaatt

SEQ ID NO: 1138 - DNA, 21 bp, Artificial Sequence
  Synthetic
  misc_feature (1)..(1): 5'-3 attached terminal deoxyabasic moiety
  misc_feature (21)..(21): 3'-3 attached terminal deoxyabasic moiety
  misc_feature (1)..(1): 2'-deoxy-2'-fluoro cytidine
  misc_feature (3)..(3): 2'-deoxy-2'-fluoro cytidine
  misc_feature (5)..(5): 2'-deoxy-2'-fluoro cytidine
  misc_feature (12)..(13): 2'-deoxy-2'-fluoro cytidine
  misc_feature (17)..(17): 2'-deoxy-2'-fluoro cytidine
  misc_feature (10)..(11): 2'-deoxy-2'-fluoro uridine
  misc_feature (14)..(14): 2'-deoxy-2'-fluoro uridine
  misc_feature (1)..(19): ribonucleotide unmodified or modified as described for this sequence
cacacaggguuccugacagtt

SEQ ID NO: 1139 - DNA, 21 bp, Artificial Sequence
  Synthetic
  misc_feature (1)..(1): 5'-3 attached terminal deoxyabasic moiety
  misc_feature (21)..(21): 3'-3 attached terminal deoxyabasic moiety
  misc_feature (3)..(3): 2'-deoxy-2'-fluoro cytidine
  misc_feature (5)..(5): 2'-deoxy-2'-fluoro cytidine
  misc_feature (10)..(10): 2'-deoxy-2'-fluoro cytidine
  misc_feature (12)..(12): 2'-deoxy-2'-fluoro cytidine
  misc_feature (16)..(16): 2'-deoxy-2'-fluoro cytidine
  misc_feature (19)..(19): 2'-deoxy-2'-fluoro cytidine
  misc_feature (4)..(4): 2'-deoxy-2'-fluoro uridine
  misc_feature (6)..(6): 2'-deoxy-2'-fluoro uridine
  misc_feature (9)..(9): 2'-deoxy-2'-fluoro uridine
  misc_feature (13)..(13): 2'-deoxy-2'-fluoro uridine
  misc_feature (18)..(18): 2'-deoxy-2'-fluoro uridine
  misc_feature (1)..(19): ribonucleotide unmodified or modified as described for this sequence
ggcucuagucacuggcauctt

SEQ ID NO: 1140 - DNA, 21 bp, Artificial Sequence
  Synthetic
  misc_feature (1)..(1): 5'-3 attached terminal deoxyabasic moiety
  misc_feature (21)..(21): 3'-3 attached terminal deoxyabasic moiety
  misc_feature (12)..(12): 2'-deoxy-2'-fluoro cytidine
  misc_feature (14)..(14): 2'-deoxy-2'-fluoro cytidine
  misc_feature (1)..(1): 2'-deoxy-2'-fluoro uridine
  misc_feature (3)..(3): 2'-deoxy-2'-fluoro uridine
  misc_feature (8)..(9): 2'-deoxy-2'-fluoro uridine
  misc_feature (13)..(13): 2'-deoxy-2'-fluoro uridine
  misc_feature (17)..(17): 2'-deoxy-2'-fluoro uridine
  misc_feature (19)..(19): 2'-deoxy-2'-fluoro uridine
  misc_feature (1)..(19): ribonucleotide unmodified or modified as described for this sequence
uguggaguugacucggugutt

SEQ ID NO: 1141 - DNA, 21 bp, Artificial Sequence
  Synthetic
  misc_feature (3)..(3): 2'-deoxy-2'-fluoro cytidine
  misc_feature (5)..(5): 2'-deoxy-2'-fluoro cytidine
  misc_feature (9)..(9): 2'-deoxy-2'-fluoro cytidine
  misc_feature (17)..(17): 2'-deoxy-2'-fluoro cytidine
  misc_feature (1)..(2): 2'-deoxy-2'-fluoro uridine
  misc_feature (4)..(4): 2'-deoxy-2'-fluoro uridine
  misc_feature (6)..(6): 2'-deoxy-2'-fluoro uridine
  misc_feature (12)..(12): 2'-deoxy-2'-fluoro uridine
  misc_feature (16)..(16): 2'-deoxy-2'-fluoro uridine
  misc_feature (18)..(18): 2'-deoxy-2'-fluoro uridine
  misc_feature (20)..(20): Phosphorothioate 3'-Internucleotide Linkage
  misc_feature (1)..(19): ribonucleotide unmodified or modified as described for this sequence
uucucuggcaguaggucugtt

SEQ ID NO: 1142 - DNA, 21 bp, Artificial Sequence
  Synthetic
  misc_feature (1)..(1): 2'-deoxy-2'-fluoro cytidine
  misc_feature (5)..(5): 2'-deoxy-2'-fluoro cytidine
  misc_feature (11)..(13): 2'-deoxy-2'-fluoro cytidine
  misc_feature (2)..(2): 2'-deoxy-2'-fluoro uridine
  misc_feature (4)..(4): 2'-deoxy-2'-fluoro uridine
  misc_feature (14)..(14): 2'-deoxy-2'-fluoro uridine
  misc_feature (16)..(16): 2'-deoxy-2'-fluoro uridine
  misc_feature (18)..(18): 2'-deoxy-2'-fluoro uridine
  misc_feature (20)..(20): Phosphorothioate 3'-Internucleotide Linkage
  misc_feature (1)..(19): ribonucleotide unmodified or modified as described for this sequence
cugucaggaacccugugugtt

SEQ ID NO: 1143 - DNA, 21 bp, Artificial Sequence
  Synthetic
  misc_feature (5)..(6): 2'-deoxy-2'-fluoro cytidine
  misc_feature (12)..(12): 2'-deoxy-2'-fluoro cytidine
  misc_feature (18)..(19): 2'-deoxy-2'-fluoro cytidine
  misc_feature (3)..(3): 2'-deoxy-2'-fluoro uridine
  misc_feature (9)..(9): 2'-deoxy-2'-fluoro uridine
  misc_feature (13)..(13): 2'-deoxy-2'-fluoro uridine
  misc_feature (20)..(20): Phosphorothioate 3'-Internucleotide Linkage
  misc_feature (1)..(19): ribonucleotide unmodified or modified as described for this sequence
gaugccagugacuagagcctt

SEQ ID NO: 1144 - DNA, 21 bp, Artificial Sequence
  Synthetic
  misc_feature (2)..(2): 2'-deoxy-2'-fluoro cytidine
  misc_feature (4)..(5): 2'-deoxy-2'-fluoro cytidine
  misc_feature (10)..(10): 2'-deoxy-2'-fluoro cytidine
  misc_feature (13)..(13): 2'-deoxy-2'-fluoro cytidine
  misc_feature (15)..(16): 2'-deoxy-2'-fluoro cytidine
  misc_feature (18)..(18): 2'-deoxy-2'-fluoro cytidine
  misc_feature (9)..(9): 2'-deoxy-2'-fluoro uridine
  misc_feature (14)..(14): 2'-deoxy-2'-fluoro uridine
  misc_feature (20)..(20): Phosphorothioate 3'-Internucleotide Linkage
  misc_feature (1)..(19): ribonucleotide unmodified or modified as described for this sequence
acaccgagucaacuccacatt

SEQ ID NO: 1145 - DNA, 21 bp, Artificial Sequence
  Synthetic
  misc_feature (1)..(1): 5'-3 attached terminal deoxyabasic moiety
  misc_feature (21)..(21): 3'-3 attached terminal deoxyabasic moiety
  misc_feature (1)..(1): 2'-deoxy-2'-fluoro cytidine
  misc_feature (5)..(6): 2'-deoxy-2'-fluoro cytidine
  misc_feature (9)..(9): 2'-deoxy-2'-fluoro cytidine
  misc_feature (12)..(13): 2'-deoxy-2'-fluoro cytidine
  misc_feature (7)..(7): 2'-deoxy-2'-fluoro uridine
  misc_feature (10)..(10): 2'-deoxy-2'-fluoro uridine
  misc_feature (2)..(2): 2'-deoxy Adenosine
  misc_feature (4)..(4): 2'-deoxy Adenosine
  misc_feature (8)..(8): 2'-deoxy Adenosine
  misc_feature (14)..(14): 2'-deoxy Adenosine
  misc_feature (16)..(16): 2'-deoxy Adenosine
  misc_feature (18)..(19): 2'-deoxy Adenosine
  misc_feature (3)..(3): 2'-deoxy Guanosine
  misc_feature (11)..(11): 2'-deoxy Guanosine
  misc_feature (15)..(15): 2'-deoxy Guanosine
  misc_feature (17)..(17): 2'-deoxy Guanosine
  misc_feature (1)..(19): ribonucleotide unmodified or modified as described for this sequence
cagaccuacugccagagaatt

SEQ ID NO: 1146 - DNA, 21 bp, Artificial Sequence
  Synthetic
  misc_feature (1)..(1): 5'-3 attached terminal deoxyabasic moiety
  misc_feature (21)..(21): 3'-3 attached terminal deoxyabasic moiety
  misc_feature (1)..(1): 2'-deoxy-2'-fluoro cytidine
  misc_feature (3)..(3): 2'-deoxy-2'-fluoro cytidine
  misc_feature (5)..(5): 2'-deoxy-2'-fluoro cytidine
  misc_feature (12)..(13): 2'-deoxy-2'-fluoro cytidine
  misc_feature (17)..(17): 2'-deoxy-2'-fluoro cytidine
  misc_feature (10)..(11): 2'-deoxy-2'-fluoro uridine
  misc_feature (14)..(14): 2'-deoxy-2'-fluoro uridine
  misc_feature (2)..(2): 2'-deoxy Adenosine
  misc_feature (4)..(4): 2'-deoxy Adenosine
  misc_feature (6)..(6): 2'-deoxy Adenosine
  misc_feature (16)..(16): 2'-deoxy Adenosine
  misc_feature (18)..(18): 2'-deoxy Adenosine
  misc_feature (7)..(9): 2'-deoxy Guanosine
  misc_feature (15)..(15): 2'-deoxy Guanosine
  misc_feature (19)..(19): 2'-deoxy Guanosine
  misc_feature (1)..(19): ribonucleotide unmodified or modified as described for this sequence
cacacaggguuccugacagtt

SEQ ID NO: 1147 - DNA, 21 bp, Artificial Sequence
  Synthetic
  misc_feature (1)..(1): 5'-3 attached terminal deoxyabasic moiety
  misc_feature (21)..(21): 3'-3 attached terminal deoxyabasic moiety
  misc_feature (3)..(3): 2'-deoxy-2'-fluoro cytidine
  misc_feature (5)..(5): 2'-deoxy-2'-fluoro cytidine
  misc_feature (10)..(10): 2'-deoxy-2'-fluoro cytidine
  misc_feature (12)..(12): 2'-deoxy-2'-fluoro cytidine
  misc_feature (16)..(16): 2'-deoxy-2'-fluoro cytidine
  misc_feature (19)..(19): 2'-deoxy-2'-fluoro cytidine
  misc_feature (4)..(4): 2'-deoxy-2'-fluoro uridine
  misc_feature (6)..(6): 2'-deoxy-2'-fluoro uridine
  misc_feature (9)..(9): 2'-deoxy-2'-fluoro uridine
  misc_feature (13)..(13): 2'-deoxy-2'-fluoro uridine
  misc_feature (18)..(18): 2'-deoxy-2'-fluoro uridine
  misc_feature (7)..(7): 2'-deoxy Adenosine
  misc_feature (11)..(11): 2'-deoxy Adenosine
  misc_feature (17)..(17): 2'-deoxy Adenosine
  misc_feature (1)..(2): 2'-deoxy Guanosine
  misc_feature (8)..(8): 2'-deoxy Guanosine
  misc_feature (14)..(15): 2'-deoxy Guanosine
  misc_feature (1)..(19): ribonucleotide unmodified or modified as described for this sequence
ggcucuagucacuggcauctt

SEQ ID NO: 1148 - DNA, 21 bp, Artificial Sequence
  Synthetic
  misc_feature (1)..(1): 5'-3 attached terminal deoxyabasic moiety
  misc_feature (21)..(21): 3'-3 attached terminal deoxyabasic moiety
  misc_feature (12)..(12): 2'-deoxy-2'-fluoro cytidine
  misc_feature (14)..(14): 2'-deoxy-2'-fluoro cytidine
  misc_feature (1)..(1): 2'-deoxy-2'-fluoro uridine
  misc_feature (3)..(3): 2'-deoxy-2'-fluoro uridine
  misc_feature (8)..(9): 2'-deoxy-2'-fluoro uridine
  misc_feature (13)..(13): 2'-deoxy-2'-fluoro uridine
  misc_feature (17)..(17): 2'-deoxy-2'-fluoro uridine
  misc_feature (19)..(19): 2'-deoxy-2'-fluoro uridine
  misc_feature (6)..(6): 2'-deoxy Adenosine
  misc_feature (11)..(11): 2'-deoxy Adenosine
  misc_feature (2)..(2): 2'-deoxy Guanosine
  misc_feature (4)..(5): 2'-deoxy Guanosine
  misc_feature (7)..(7): 2'-deoxy Guanosine
  misc_feature (10)..(10): 2'-deoxy Guanosine
  misc_feature (15)..(16): 2'-deoxy Guanosine
  misc_feature (18)..(18): 2'-deoxy Guanosine
  misc_feature (1)..(19): ribonucleotide unmodified or modified as described for this sequence
uguggaguugacucggugutt

SEQ ID NO: 1149 - DNA, 21 bp, Artificial Sequence
  Synthetic
  misc_feature (3)..(3): 2'-deoxy-2'-fluoro cytidine
  misc_feature (5)..(5): 2'-deoxy-2'-fluoro cytidine
  misc_feature (9)..(9): 2'-deoxy-2'-fluoro cytidine
  misc_feature (17)..(17): 2'-deoxy-2'-fluoro cytidine
  misc_feature (1)..(2): 2'-deoxy-2'-fluoro uridine
  misc_feature (4)..(4): 2'-deoxy-2'-fluoro uridine
  misc_feature (6)..(6): 2'-deoxy-2'-fluoro uridine
  misc_feature (12)..(12): 2'-deoxy-2'-fluoro uridine
  misc_feature (16)..(16): 2'-deoxy-2'-fluoro uridine
  misc_feature (18)..(18): 2'-deoxy-2'-fluoro uridine
  misc_feature (10)..(10): 2'-deoxy Adenosine
  misc_feature (13)..(13): 2'-deoxy Adenosine
  misc_feature (7)..(8): 2'-deoxy Guanosine
  misc_feature (11)..(11): 2'-deoxy Guanosine
  misc_feature (14)..(15): 2'-deoxy Guanosine
  misc_feature (19)..(19): 2'-deoxy Guanosine
  misc_feature (20)..(20): Phosphorothioate 3'-Internucleotide Linkage
  misc_feature (1)..(19): ribonucleotide unmodified or modified as described for this sequence
uucucuggcaguaggucugtt

SEQ ID NO: 1150 - DNA, 21 bp, Artificial Sequence
  Synthetic
  misc_feature (1)..(1): 2'-deoxy-2'-fluoro cytidine
  misc_feature (5)..(5): 2'-deoxy-2'-fluoro cytidine
  misc_feature (11)..(13): 2'-deoxy-2'-fluoro cytidine
  misc_feature (2)..(2): 2'-deoxy-2'-fluoro uridine
  misc_feature (4)..(4): 2'-deoxy-2'-fluoro uridine
  misc_feature (14)..(14): 2'-deoxy-2'-fluoro uridine
  misc_feature (16)..(16): 2'-deoxy-2'-fluoro uridine
  misc_feature (18)..(18): 2'-deoxy-2'-fluoro uridine
  misc_feature (6)..(6): 2'-deoxy Adenosine
  misc_feature (9)..(10): 2'-deoxy Adenosine
  misc_feature (3)..(3): 2'-deoxy Guanosine
  misc_feature (7)..(8): 2'-deoxy Guanosine
  misc_feature (15)..(15): 2'-deoxy Guanosine
  misc_feature (17)..(17): 2'-deoxy Guanosine
  misc_feature (19)..(19): 2'-deoxy Guanosine
  misc_feature (20)..(20): Phosphorothioate 3'-Internucleotide Linkage
  misc_feature (1)..(19): ribonucleotide unmodified or modified as described for this sequence
cugucaggaacccugugugtt

SEQ ID NO: 1151 - DNA, 21 bp, Artificial Sequence
  Synthetic
  misc_feature (5)..(6): 2'-deoxy-2'-fluoro cytidine
  misc_feature (12)..(12): 2'-deoxy-2'-fluoro cytidine
  misc_feature (18)..(19): 2'-deoxy-2'-fluoro cytidine
  misc_feature (3)..(3): 2'-deoxy-2'-fluoro uridine
  misc_feature (9)..(9): 2'-deoxy-2'-fluoro uridine
  misc_feature (13)..(13): 2'-deoxy-2'-fluoro uridine
  misc_feature (2)..(2): 2'-deoxy Adenosine
  misc_feature (7)..(7): 2'-deoxy Adenosine
  misc_feature (11)..(11): 2'-deoxy Adenosine
  misc_feature (14)..(14): 2'-deoxy Adenosine
  misc_feature (16)..(16): 2'-deoxy Adenosine
  misc_feature (1)..(1): 2'-deoxy Guanosine
  misc_feature (4)..(4): 2'-deoxy Guanosine
  misc_feature (8)..(8): 2'-deoxy Guanosine
  misc_feature (10)..(10): 2'-deoxy Guanosine
  misc_feature (15)..(15): 2'-deoxy Guanosine
  misc_feature (17)..(17): 2'-deoxy Guanosine
  misc_feature (20)..(20): Phosphorothioate 3'-Internucleotide Linkage
  misc_feature (1)..(19): ribonucleotide unmodified or modified as described for this sequence
gaugccagugacuagagcctt

SEQ ID NO: 1152 - DNA, 21 bp, Artificial Sequence
  Synthetic
  misc_feature (2)..(2): 2'-deoxy-2'-fluoro cytidine
  misc_feature (4)..(5): 2'-deoxy-2'-fluoro cytidine
  misc_feature (10)..(10): 2'-deoxy-2'-fluoro cytidine
  misc_feature (13)..(13): 2'-deoxy-2'-fluoro cytidine
  misc_feature (15)..(16): 2'-deoxy-2'-fluoro cytidine
  misc_feature (18)..(18): 2'-deoxy-2'-fluoro cytidine
  misc_feature (9)..(9): 2'-deoxy-2'-fluoro uridine
  misc_feature (14)..(14): 2'-deoxy-2'-fluoro uridine
  misc_feature (1)..(1): 2'-deoxy Adenosine
  misc_feature (3)..(3): 2'-deoxy Adenosine
  misc_feature (7)..(7): 2'-deoxy Adenosine
  misc_feature (11)..(12): 2'-deoxy Adenosine
  misc_feature (17)..(17): 2'-deoxy Adenosine
  misc_feature (19)..(19): 2'-deoxy Adenosine
  misc_feature (6)..(6): 2'-deoxy Guanosine
  misc_feature (8)..(8): 2'-deoxy Guanosine
  misc_feature (20)..(20): Phosphorothioate 3'-Internucleotide Linkage
  misc_feature (1)..(19): ribonucleotide unmodified or modified as described for this sequence
acaccgagucaacuccacatt

SEQ ID NO: 1153 - DNA, 21 bp, Artificial Sequence
  Synthetic
  misc_feature (1)..(19): ribonucleotide unmodified or modified as described for this sequence
uucgaacaucagaccuacutt

SEQ ID NO: 1154 - DNA, 21 bp, Artificial Sequence
  Synthetic
  misc_feature (1)..(19): ribonucleotide unmodified or modified as described for this sequence
aacuccaagggcuauaccatt

SEQ ID NO: 1155 - DNA, 21 bp, Artificial Sequence
  Synthetic
  misc_feature (1)..(19): ribonucleotide unmodified or modified as described for this sequence
ggcuauaccaaguccaucgtt

SEQ ID NO: 1156 - DNA, 21 bp, Artificial Sequence
  Synthetic
  misc_feature (1)..(19): ribonucleotide unmodified or modified as described for this sequence
cuguguguggugagcagaatt

SEQ ID NO: 1157 - DNA, 21 bp, Artificial Sequence
  Synthetic
  misc_feature (1)..(19): ribonucleotide unmodified or modified as described for this sequence
aguaggucugauguucgaatt

SEQ ID NO: 1158 - DNA, 21 bp, Artificial Sequence
  Synthetic
  misc_feature (1)..(19): ribonucleotide unmodified or modified as described for this sequence
ugguauagcccuuggaguutt

SEQ ID NO: 1159 - DNA, 21 bp, Artificial Sequence
  Synthetic
  misc_feature (1)..(19): ribonucleotide unmodified or modified as described for this sequence
cgauggacuugguauagcctt

SEQ ID NO: 1160 - DNA, 21 bp, Artificial Sequence
  Synthetic
  misc_feature (1)..(19): ribonucleotide unmodified or modified as described for this sequence
uucugcucaccacacacagtt

SEQ ID NO: 1161 - DNA, 21 bp, Artificial Sequence
  Synthetic
  misc_feature (1)..(1): 5'-3 attached terminal deoxyabasic moiety
  misc_feature (21)..(21): 3'-3 attached terminal deoxyabasic moiety
  misc_feature (3)..(3): 2'-deoxy-2'-fluoro cytidine
  misc_feature (7)..(7): 2'-deoxy-2'-fluoro cytidine
  misc_feature (10)..(10): 2'-deoxy-2'-fluoro cytidine
  misc_feature (14)..(15): 2'-deoxy-2'-fluoro cytidine
  misc_feature (18)..(18): 2'-deoxy-2'-fluoro cytidine
  misc_feature (1)..(2): 2'-deoxy-2'-fluoro uridine
  misc_feature (9)..(9): 2'-deoxy-2'-fluoro uridine
  misc_feature (16)..(16): 2'-deoxy-2'-fluoro uridine
  misc_feature (19)..(19): 2'-deoxy-2'-fluoro uridine
  misc_feature (1)..(19): ribonucleotide unmodified or modified as described for this sequence
uucgaacaucagaccuacutt

SEQ ID NO: 1162 - DNA, 21 bp, Artificial Sequence
  Synthetic
  misc_feature (1)..(1): 5'-3 attached terminal deoxyabasic moiety
  misc_feature (21)..(21): 3'-3 attached terminal deoxyabasic moiety
  misc_feature (3)..(3): 2'-deoxy-2'-fluoro cytidine
  misc_feature (5)..(6): 2'-deoxy-2'-fluoro cytidine
  misc_feature (12)..(12): 2'-deoxy-2'-fluoro cytidine
  misc_feature (17)..(18): 2'-deoxy-2'-fluoro cytidine
  misc_feature (4)..(4): 2'-deoxy-2'-fluoro uridine
  misc_feature (13)..(13): 2'-deoxy-2'-fluoro uridine
  misc_feature (15)..(15): 2'-deoxy-2'-fluoro uridine
  misc_feature (1)..(19): ribonucleotide unmodified or modified as described for this sequence
aacuccaagggcuauaccatt

SEQ ID NO: 1163 - DNA, 21 bp, Artificial Sequence
  Synthetic
  misc_feature (1)..(1): 5'-3 attached terminal deoxyabasic moiety
  misc_feature (21)..(21): 3'-3 attached terminal deoxyabasic moiety
  misc_feature (3)..(3): 2'-deoxy-2'-fluoro cytidine
  misc_feature (8)..(9): 2'-deoxy-2'-fluoro cytidine
  misc_feature (14)..(15): 2'-deoxy-2'-fluoro cytidine
  misc_feature (18)..(18): 2'-deoxy-2'-fluoro cytidine
  misc_feature (4)..(4): 2'-deoxy-2'-fluoro uridine
  misc_feature (6)..(6): 2'-deoxy-2'-fluoro uridine
  misc_feature (13)..(13): 2'-deoxy-2'-fluoro uridine
  misc_feature (17)..(17): 2'-deoxy-2'-fluoro uridine
  misc_feature (1)..(19): ribonucleotide unmodified or modified as described for this sequence
ggcuauaccaaguccaucgtt

SEQ ID NO: 1164 - DNA, 21 bp, Artificial Sequence
  Synthetic
  misc_feature (1)..(1): 5'-3 attached terminal deoxyabasic moiety
  misc_feature (21)..(21): 3'-3 attached terminal deoxyabasic moiety
  misc_feature (1)..(1): 2'-deoxy-2'-fluoro cytidine
  misc_feature (15)..(15): 2'-deoxy-2'-fluoro cytidine
  misc_feature (2)..(2): 2'-deoxy-2'-fluoro uridine
  misc_feature (4)..(4): 2'-deoxy-2'-fluoro uridine
  misc_feature (6)..(6): 2'-deoxy-2'-fluoro uridine
  misc_feature (8)..(8): 2'-deoxy-2'-fluoro uridine
  misc_feature (11)..(11): 2'-deoxy-2'-fluoro uridine
  misc_feature (1)..(19): ribonucleotide unmodified or modified as described for this sequence
cuguguguggugagcagaatt

SEQ ID NO: 1165 - DNA, 21 bp, Artificial Sequence
  Synthetic
  misc_feature (8)..(8): 2'-deoxy-2'-fluoro cytidine
  misc_feature (16)..(16): 2'-deoxy-2'-fluoro cytidine
  misc_feature (3)..(3): 2'-deoxy-2'-fluoro uridine
  misc_feature (7)..(7): 2'-deoxy-2'-fluoro uridine
  misc_feature (9)..(9): 2'-deoxy-2'-fluoro uridine
  misc_feature (12)..(12): 2'-deoxy-2'-fluoro uridine
  misc_feature (14)..(15): 2'-deoxy-2'-fluoro uridine
  misc_feature (20)..(20): Phosphorothioate 3'-Internucleotide Linkage
  misc_feature (1)..(19): ribonucleotide unmodified or modified as described for this sequence
aguaggucugauguucgaatt

SEQ ID NO: 1166 - DNA, 21 bp, Artificial Sequence
  Synthetic
  misc_feature (9)..(11): 2'-deoxy-2'-fluoro cytidine
  misc_feature (1)..(1): 2'-deoxy-2'-fluoro uridine
  misc_feature (4)..(4): 2'-deoxy-2'-fluoro uridine
  misc_feature (6)..(6): 2'-deoxy-2'-fluoro uridine
  misc_feature (12)..(13): 2'-deoxy-2'-fluoro uridine
  misc_feature (18)..(19): 2'-deoxy-2'-fluoro uridine
  misc_feature (20)..(20): Phosphorothioate 3'-Internucleotide Linkage
  misc_feature (1)..(19): ribonucleotide unmodified or modified as described for this sequence
ugguauagcccuuggaguutt

SEQ ID NO: 1167 - DNA, 21 bp, Artificial Sequence
  Synthetic
  misc_feature (1)..(1): 2'-deoxy-2'-fluoro cytidine
  misc_feature (8)..(8): 2'-deoxy-2'-fluoro cytidine
  misc_feature (18)..(19): 2'-deoxy-2'-fluoro cytidine
  misc_feature (4)..(4): 2'-deoxy-2'-fluoro uridine
  misc_feature (9)..(10): 2'-deoxy-2'-fluoro uridine
  misc_feature (13)..(13): 2'-deoxy-2'-fluoro uridine
  misc_feature (15)..(15): 2'-deoxy-2'-fluoro uridine
  misc_feature (20)..(20): Phosphorothioate 3'-Internucleotide Linkage
  misc_feature (1)..(19): ribonucleotide unmodified or modified as described for this sequence
cgauggacuugguauagcctt

SEQ ID NO: 1168 - DNA, 21 bp, Artificial Sequence
  Synthetic
  misc_feature (3)..(3): 2'-deoxy-2'-fluoro cytidine
  misc_feature (6)..(6): 2'-deoxy-2'-fluoro cytidine
  misc_feature (8)..(8): 2'-deoxy-2'-fluoro cytidine
  misc_feature (10)..(11): 2'-deoxy-2'-fluoro cytidine
  misc_feature (13)..(13): 2'-deoxy-2'-fluoro cytidine
  misc_feature (15)..(15): 2'-deoxy-2'-fluoro cytidine
  misc_feature (17)..(17): 2'-deoxy-2'-fluoro cytidine
  misc_feature (1)..(2): 2'-deoxy-2'-fluoro uridine
  misc_feature (4)..(4): 2'-deoxy-2'-fluoro uridine
  misc_feature (7)..(7): 2'-deoxy-2'-fluoro uridine
  misc_feature (20)..(20): Phosphorothioate 3'-Internucleotide Linkage
  misc_feature (1)..(19): ribonucleotide unmodified or modified as described for this sequence
uucugcucaccacacacagtt

SEQ ID NO: 1169 - DNA, 21 bp, Artificial Sequence
  Synthetic
  misc_feature (1)..(1): 5'-3 attached terminal deoxyabasic moiety
  misc_feature (21)..(21): 3'-3 attached terminal deoxyabasic moiety
  misc_feature (3)..(3): 2'-deoxy-2'-fluoro cytidine
  misc_feature (7)..(7): 2'-deoxy-2'-fluoro cytidine
  misc_feature (10)..(10): 2'-deoxy-2'-fluoro cytidine
  misc_feature (14)..(15): 2'-deoxy-2'-fluoro cytidine
  misc_feature (18)..(18): 2'-deoxy-2'-fluoro cytidine
  misc_feature (1)..(2): 2'-deoxy-2'-fluoro uridine
  misc_feature (9)..(9): 2'-deoxy-2'-fluoro uridine
  misc_feature (16)..(16): 2'-deoxy-2'-fluoro uridine
  misc_feature (19)..(19): 2'-deoxy-2'-fluoro uridine
  misc_feature (5)..(6): 2'-deoxy Adenosine
  misc_feature (8)..(8): 2'-deoxy Adenosine
  misc_feature (11)..(11): 2'-deoxy Adenosine
  misc_feature (13)..(13): 2'-deoxy Adenosine
  misc_feature (17)..(17): 2'-deoxy Adenosine
  misc_feature (4)..(4): 2'-deoxy Guanosine
  misc_feature (12)..(12): 2'-deoxy Guanosine
  misc_feature (1)..(19): ribonucleotide unmodified or modified as described for this sequence
uucgaacaucagaccuacutt

SEQ ID NO: 1170 - DNA, 21 bp, Artificial Sequence
  Synthetic
  misc_feature (1)..(1): 5'-3 attached terminal deoxyabasic moiety
  misc_feature (21)..(21): 3'-3 attached terminal deoxyabasic moiety
  misc_feature (3)..(3): 2'-deoxy-2'-fluoro cytidine
  misc_feature (5)..(6): 2'-deoxy-2'-fluoro cytidine
  misc_feature (12)..(12): 2'-deoxy-2'-fluoro cytidine
  misc_feature (17)..(18): 2'-deoxy-2'-fluoro cytidine
  misc_feature (4)..(4): 2'-deoxy-2'-fluoro uridine
  misc_feature (13)..(13): 2'-deoxy-2'-fluoro uridine
  misc_feature (15)..(15): 2'-deoxy-2'-fluoro uridine
  misc_feature (1)..(2): 2'-deoxy Adenosine
  misc_feature (7)..(8): 2'-deoxy Adenosine
  misc_feature (14)..(14): 2'-deoxy Adenosine
  misc_feature (16)..(16): 2'-deoxy Adenosine
  misc_feature (19)..(19): 2'-deoxy Adenosine
  misc_feature (9)..(11): 2'-deoxy Guanosine
  misc_feature (1)..(19): ribonucleotide unmodified or modified as described for this sequence
aacuccaagggcuauaccatt

SEQ ID NO: 1171 - DNA, 21 bp, Artificial Sequence
  Synthetic
  misc_feature (1)..(1): 5'-3 attached terminal deoxyabasic moiety
  misc_feature (21)..(21): 3'-3 attached terminal deoxyabasic moiety
  misc_feature (3)..(3): 2'-deoxy-2'-fluoro cytidine
  misc_feature (8)..(9): 2'-deoxy-2'-fluoro cytidine
  misc_feature (14)..(15): 2'-deoxy-2'-fluoro cytidine
  misc_feature (18)..(18): 2'-deoxy-2'-fluoro cytidine
  misc_feature (4)..(4): 2'-deoxy-2'-fluoro uridine
  misc_feature (6)..(6): 2'-deoxy-2'-fluoro uridine
  misc_feature (13)..(13): 2'-deoxy-2'-fluoro uridine
  misc_feature (17)..(17): 2'-deoxy-2'-fluoro uridine
  misc_feature (5)..(5): 2'-deoxy Adenosine
  misc_feature (7)..(7): 2'-deoxy Adenosine
  misc_feature (10)..(11): 2'-deoxy Adenosine
  misc_feature (16)..(16): 2'-deoxy Adenosine
  misc_feature (1)..(2): 2'-deoxy Guanosine
  misc_feature (12)..(12): 2'-deoxy Guanosine
  misc_feature (19)..(19): 2'-deoxy Guanosine
  misc_feature (1)..(19): ribonucleotide unmodified or modified as described for this sequence
ggcuauaccaaguccaucgtt

SEQ ID NO: 1172 - DNA, 21 bp, Artificial Sequence
  Synthetic
  misc_feature (1)..(1): 5'-3 attached terminal deoxyabasic moiety
  misc_feature (21)..(21): 3'-3 attached terminal deoxyabasic moiety
  misc_feature (1)..(1): 2'-deoxy-2'-fluoro cytidine
  misc_feature (15)..(15): 2'-deoxy-2'-fluoro cytidine
  misc_feature (2)..(2): 2'-deoxy-2'-fluoro uridine
  misc_feature (4)..(4): 2'-deoxy-2'-fluoro uridine
  misc_feature (6)..(6): 2'-deoxy-2'-fluoro uridine
  misc_feature (8)..(8): 2'-deoxy-2'-fluoro uridine
  misc_feature (11)..(11): 2'-deoxy-2'-fluoro uridine
  misc_feature (13)..(13): 2'-deoxy Adenosine
  misc_feature (16)..(16): 2'-deoxy Adenosine
  misc_feature (18)..(19): 2'-deoxy Adenosine
  misc_feature (3)..(3): 2'-deoxy Guanosine
  misc_feature (5)..(5): 2'-deoxy Guanosine
  misc_feature (7)..(7): 2'-deoxy Guanosine
  misc_feature (9)..(10): 2'-deoxy Guanosine
  misc_feature (12)..(12): 2'-deoxy Guanosine
  misc_feature (14)..(14): 2'-deoxy Guanosine
  misc_feature (17)..(17): 2'-deoxy Guanosine
  misc_feature (1)..(19): ribonucleotide unmodified or modified as described for this sequence
cuguguguggugagcagaatt

SEQ ID NO: 1173 - DNA, 21 bp, Artificial Sequence
  Synthetic
  misc_feature (8)..(8): 2'-deoxy-2'-fluoro cytidine
  misc_feature (16)..(16): 2'-deoxy-2'-fluoro cytidine
  misc_feature (3)..(3): 2'-deoxy-2'-fluoro uridine
  misc_feature (7)..(7): 2'-deoxy-2'-fluoro uridine
  misc_feature (9)..(9): 2'-deoxy-2'-fluoro uridine
  misc_feature (12)..(12): 2'-deoxy-2'-fluoro uridine
  misc_feature (14)..(15): 2'-deoxy-2'-fluoro uridine
  misc_feature (1)..(1): 2'-deoxy Adenosine
  misc_feature (4)..(4): 2'-deoxy Adenosine
  misc_feature (11)..(11): 2'-deoxy Adenosine
  misc_feature (18)..(19): 2'-deoxy Adenosine
  misc_feature (2)..(2): 2'-deoxy Guanosine
  misc_feature (5)..(6): 2'-deoxy Guanosine
  misc_feature (10)..(10): 2'-deoxy Guanosine
  misc_feature (13)..(13): 2'-deoxy Guanosine
  misc_feature (17)..(17): 2'-deoxy Guanosine
  misc_feature (20)..(20): Phosphorothioate 3'-Internucleotide Linkage
  misc_feature (1)..(19): ribonucleotide unmodified or modified as described for this sequence
aguaggucugauguucgaatt

SEQ ID NO: 1174 - DNA, 21 bp, Artificial Sequence
  Synthetic
  misc_feature (9)..(11): 2'-deoxy-2'-fluoro cytidine
  misc_feature (1)..(1): 2'-deoxy-2'-fluoro uridine
  misc_feature (4)..(4): 2'-deoxy-2'-fluoro uridine
  misc_feature (6)..(6): 2'-deoxy-2'-fluoro uridine
  misc_feature (12)..(13): 2'-deoxy-2'-fluoro uridine
  misc_feature (18)..(19): 2'-deoxy-2'-fluoro uridine
  misc_feature (5)..(5): 2'-deoxy Adenosine
  misc_feature (7)..(7): 2'-deoxy Adenosine
  misc_feature (16)..(16): 2'-deoxy Adenosine
  misc_feature (2)..(3): 2'-deoxy Guanosine
  misc_feature (8)..(8): 2'-deoxy Guanosine
  misc_feature (14)..(15): 2'-deoxy Guanosine
  misc_feature (17)..(17): 2'-deoxy Guanosine
  misc_feature (20)..(20): Phosphorothioate 3'-Internucleotide Linkage
  misc_feature (1)..(19): ribonucleotide unmodified or modified as described for this sequence
ugguauagcccuuggaguutt

SEQ ID NO: 1175 - DNA, 21 bp, Artificial Sequence
  Synthetic
  misc_feature (1)..(1): 2'-deoxy-2'-fluoro cytidine
  misc_feature (8)..(8): 2'-deoxy-2'-fluoro cytidine
  misc_feature (18)..(19): 2'-deoxy-2'-fluoro cytidine
  misc_feature (4)..(4): 2'-deoxy-2'-fluoro uridine
  misc_feature (9)..(10): 2'-deoxy-2'-fluoro uridine
  misc_feature (13)..(13): 2'-deoxy-2'-fluoro uridine
  misc_feature (15)..(15): 2'-deoxy-2'-fluoro uridine
  misc_feature (3)..(3): 2'-deoxy Adenosine
  misc_feature (7)..(7): 2'-deoxy Adenosine
  misc_feature (14)..(14): 2'-deoxy Adenosine
  misc_feature (16)..(16): 2'-deoxy Adenosine
  misc_feature (2)..(2): 2'-deoxy Guanosine
  misc_feature (5)..(6): 2'-deoxy Guanosine
  misc_feature (11)..(12): 2'-deoxy Guanosine
  misc_feature (17)..(17): 2'-deoxy Guanosine
  misc_feature (20)..(20): Phosphorothioate 3'-Internucleotide Linkage
  misc_feature (1)..(19): ribonucleotide unmodified or modified as described for this sequence
cgauggacuugguauagcctt

SEQ ID NO: 1176 - DNA, 21 bp, Artificial Sequence
  Synthetic
  misc_feature (3)..(3): 2'-deoxy-2'-fluoro cytidine
  misc_feature (6)..(6): 2'-deoxy-2'-fluoro cytidine
  misc_feature (8)..(8): 2'-deoxy-2'-fluoro cytidine
  misc_feature (10)..(11): 2'-deoxy-2'-fluoro cytidine
  misc_feature (13)..(13): 2'-deoxy-2'-fluoro cytidine
  misc_feature (15)..(15): 2'-deoxy-2'-fluoro cytidine
  misc_feature (17)..(17): 2'-deoxy-2'-fluoro cytidine
  misc_feature (1)..(2): 2'-deoxy-2'-fluoro uridine
  misc_feature (4)..(4): 2'-deoxy-2'-fluoro uridine
  misc_feature (7)..(7): 2'-deoxy-2'-fluoro uridine
  misc_feature (9)..(9): 2'-deoxy Adenosine
  misc_feature (12)..(12): 2'-deoxy Adenosine
  misc_feature (14)..(14): 2'-deoxy Adenosine
  misc_feature (16)..(16): 2'-deoxy Adenosine
  misc_feature (18)..(18): 2'-deoxy Adenosine
  misc_feature (5)..(5): 2'-deoxy Guanosine
  misc_feature (19)..(19): 2'-deoxy Guanosine
  misc_feature (20)..(20): Phosphorothioate 3'-Internucleotide Linkage
  misc_feature (1)..(19): ribonucleotide unmodified or modified as described for this sequence
uucugcucaccacacacagtt

SEQ ID NO: 1177 - DNA, 21 bp, Artificial Sequence
  Synthetic
  misc_feature (1)..(19): ribonucleotide unmodified or modified as described for this sequence
cagcuuggaacaccauguctt

SEQ ID NO: 1178 - DNA, 21 bp, Artificial Sequence
  Synthetic
  misc_feature (1)..(19): ribonucleotide unmodified or modified as described for this sequence
uucccagcugacucagaactt

SEQ ID NO: 1179 - DNA, 21 bp, Artificial Sequence
  Synthetic
  misc_feature (1)..(19): ribonucleotide unmodified or modified as described for this sequence
augucaacagauccgacuutt

SEQ ID NO: 1180 - DNA, 21 bp, Artificial Sequence
  Synthetic
  misc_feature (1)..(19): ribonucleotide unmodified or modified as described for this sequence
uuggccucugauacagacatt

SEQ ID NO: 1181 - DNA, 21 bp, Artificial Sequence
  Synthetic
  misc_feature (1)..(19): ribonucleotide unmodified or modified as described for this sequence
gacaugguguuccaagcugtt

SEQ ID NO: 1182 - DNA, 21 bp, Artificial Sequence
  Synthetic
  misc_feature (1)..(19): ribonucleotide unmodified or modified as described for this sequence
guucugagucagcugggaatt

SEQ ID NO: 1183 - DNA, 21 bp, Artificial Sequence
  Synthetic
  misc_feature (1)..(19): ribonucleotide unmodified or modified as described for this sequence
aagucggaucuguugacautt

SEQ ID NO: 1184 - DNA, 21 bp, Artificial Sequence
  Synthetic
  misc_feature (1)..(19): ribonucleotide unmodified or modified as described for this sequence
ugucuguaucagaggccaatt

SEQ ID NO: 1185 - DNA, 21 bp, Artificial Sequence
  Synthetic
  misc_feature (1)..(1): 5'-3 attached terminal deoxyabasic moiety
  misc_feature (21)..(21): 3'-3 attached terminal deoxyabasic moiety
  misc_feature (1)..(1): 2'-deoxy-2'-fluoro cytidine
  misc_feature (4)..(4): 2'-deoxy-2'-fluoro cytidine
  misc_feature (11)..(11): 2'-deoxy-2'-fluoro cytidine
  misc_feature (13)..(14): 2'-deoxy-2'-fluoro cytidine
  misc_feature (19)..(19): 2'-deoxy-2'-fluoro cytidine
  misc_feature (5)..(6): 2'-deoxy-2'-fluoro uridine
  misc_feature (16)..(16): 2'-deoxy-2'-fluoro uridine
  misc_feature (18)..(18): 2'-deoxy-2'-fluoro uridine
  misc_feature (1)..(19): ribonucleotide unmodified or modified as described for this sequence
cagcuuggaacaccauguctt

SEQ ID NO: 1186 - DNA, 21 bp, Artificial Sequence
  Synthetic
  misc_feature (1)..(1): 5'-3 attached terminal deoxyabasic moiety
  misc_feature (21)..(21): 3'-3 attached terminal deoxyabasic moiety
  misc_feature (3)..(5): 2'-deoxy-2'-fluoro cytidine
  misc_feature (8)..(8): 2'-deoxy-2'-fluoro cytidine
  misc_feature (12)..(12): 2'-deoxy-2'-fluoro cytidine
  misc_feature (14)..(14): 2'-deoxy-2'-fluoro cytidine
  misc_feature (19)..(19): 2'-deoxy-2'-fluoro cytidine
  misc_feature (1)..(2): 2'-deoxy-2'-fluoro uridine
  misc_feature (9)..(9): 2'-deoxy-2'-fluoro uridine
  misc_feature (13)..(13): 2'-deoxy-2'-fluoro uridine
  misc_feature (1)..(19): ribonucleotide unmodified or modified as described for this sequence
uucccagcugacucagaactt

SEQ ID NO: 1187 - DNA, 21 bp, Artificial Sequence
  Synthetic
  misc_feature (1)..(1): 5'-3 attached terminal deoxyabasic moiety
  misc_feature (21)..(21): 3'-3 attached terminal deoxyabasic moiety
  misc_feature (5)..(5): 2'-deoxy-2'-fluoro cytidine
  misc_feature (8)..(8): 2'-deoxy-2'-fluoro cytidine
  misc_feature (13)..(14): 2'-deoxy-2'-fluoro cytidine
  misc_feature (17)..(17): 2'-deoxy-2'-fluoro cytidine
  misc_feature (2)..(2): 2'-deoxy-2'-fluoro uridine
  misc_feature (4)..(4): 2'-deoxy-2'-fluoro uridine
  misc_feature (12)..(12): 2'-deoxy-2'-fluoro uridine
  misc_feature (18)..(19): 2'-deoxy-2'-fluoro uridine
  misc_feature (1)..(19): ribonucleotide unmodified or modified as described for this sequence
augucaacagauccgacuutt

SEQ ID NO: 1188 - DNA, 21 bp, Artificial Sequence
  Synthetic
  misc_feature (1)..(1): 5'-3 attached terminal deoxyabasic moiety
  misc_feature (21)..(21): 3'-3 attached terminal deoxyabasic moiety
  misc_feature (5)..(6): 2'-deoxy-2'-fluoro cytidine
  misc_feature (8)..(8): 2'-deoxy-2'-fluoro cytidine
  misc_feature (14)..(14): 2'-deoxy-2'-fluoro cytidine
  misc_feature (18)..(18): 2'-deoxy-2'-fluoro cytidine
  misc_feature (1)..(2): 2'-deoxy-2'-fluoro uridine
  misc_feature (7)..(7): 2'-deoxy-2'-fluoro uridine
  misc_feature (9)..(9): 2'-deoxy-2'-fluoro uridine
  misc_feature (12)..(12): 2'-deoxy-2'-fluoro uridine
  misc_feature (1)..(19): ribonucleotide unmodified or modified as described for this sequence
uuggccucugauacagacatt

SEQ ID NO: 1189 - DNA, 21 bp, Artificial Sequence
  Synthetic
  misc_feature (3)..(3): 2'-deoxy-2'-fluoro cytidine
  misc_feature (12)..(13): 2'-deoxy-2'-fluoro cytidine
  misc_feature (17)..(17): 2'-deoxy-2'-fluoro cytidine
  misc_feature (5)..(5): 2'-deoxy-2'-fluoro uridine
  misc_feature (8)..(8): 2'-deoxy-2'-fluoro uridine
  misc_feature (10)..(11): 2'-deoxy-2'-fluoro uridine
  misc_feature (18)..(18): 2'-deoxy-2'-fluoro uridine
  misc_feature (20)..(20): Phosphorothioate 3'-Internucleotide Linkage
  misc_feature (1)..(19): ribonucleotide unmodified or modified as described for this sequence
gacaugguguuccaagcugtt

SEQ ID NO: 1190 - DNA, 21 bp, Artificial Sequence
  Synthetic
  misc_feature (4)..(4): 2'-deoxy-2'-fluoro cytidine
  misc_feature (10)..(10): 2'-deoxy-2'-fluoro cytidine
  misc_feature (13)..(13): 2'-deoxy-2'-fluoro cytidine
  misc_feature (2)..(3): 2'-deoxy-2'-fluoro uridine
  misc_feature (5)..(5): 2'-deoxy-2'-fluoro uridine
  misc_feature (9)..(9): 2'-deoxy-2'-fluoro uridine
  misc_feature (14)..(14): 2'-deoxy-2'-fluoro uridine
  misc_feature (20)..(20): Phosphorothioate 3'-Internucleotide Linkage
  misc_feature (1)..(19): ribonucleotide unmodified or modified as described for this sequence
guucugagucagcugggaatt

SEQ ID NO: 1191 - DNA, 21 bp, Artificial Sequence
  Synthetic
  misc_feature (5)..(5): 2'-deoxy-2'-fluoro cytidine
  misc_feature (10)..(10): 2'-deoxy-2'-fluoro cytidine
  misc_feature (17)..(17): 2'-deoxy-2'-fluoro cytidine
  misc_feature (4)..(4): 2'-deoxy-2'-fluoro uridine
  misc_feature (9)..(9): 2'-deoxy-2'-fluoro uridine
  misc_feature (11)..(11): 2'-deoxy-2'-fluoro uridine
  misc_feature (13)..(14): 2'-deoxy-2'-fluoro uridine
  misc_feature (19)..(19): 2'-deoxy-2'-fluoro uridine
  misc_feature (20)..(20): Phosphorothioate 3'-Internucleotide Linkage
  misc_feature (1)..(19): ribonucleotide unmodified or modified as described for this sequence
aagucggaucuguugacautt

SEQ ID NO: 1192 - DNA, 21 bp, Artificial Sequence
  Synthetic
  misc_feature (4)..(4): 2'-deoxy-2'-fluoro cytidine
  misc_feature (10)..(10): 2'-deoxy-2'-fluoro cytidine
  misc_feature (16)..(17): 2'-deoxy-2'-fluoro cytidine
  misc_feature (1)..(1): 2'-deoxy-2'-fluoro uridine
  misc_feature (3)..(3): 2'-deoxy-2'-fluoro uridine
  misc_feature (5)..(5): 2'-deoxy-2'-fluoro uridine
  misc_feature (7)..(7): 2'-deoxy-2'-fluoro uridine
  misc_feature (9)..(9): 2'-deoxy-2'-fluoro uridine
  misc_feature (20)..(20): Phosphorothioate 3'-Internucleotide Linkage
  misc_feature (1)..(19): ribonucleotide unmodified or modified as described for this sequence
ugucuguaucagaggccaatt

SEQ ID NO: 1193 - DNA, 21 bp, Artificial Sequence
  Synthetic
  misc_feature (1)..(1): 5'-3 attached terminal deoxyabasic moiety
  misc_feature (21)..(21): 3'-3 attached terminal deoxyabasic moiety
  misc_feature (1)..(1): 2'-deoxy-2'-fluoro cytidine
  misc_feature (4)..(4): 2'-deoxy-2'-fluoro cytidine
  misc_feature (11)..(11): 2'-deoxy-2'-fluoro cytidine
  misc_feature (13)..(14): 2'-deoxy-2'-fluoro cytidine
  misc_feature (19)..(19): 2'-deoxy-2'-fluoro cytidine
  misc_feature (5)..(6): 2'-deoxy-2'-fluoro uridine
  misc_feature (16)..(16): 2'-deoxy-2'-fluoro uridine
  misc_feature (18)..(18): 2'-deoxy-2'-fluoro uridine
  misc_feature (2)..(2): 2'-deoxy Adenosine
  misc_feature (9)..(10): 2'-deoxy Adenosine
  misc_feature (12)..(12): 2'-deoxy Adenosine
  misc_feature (15)..(15): 2'-deoxy Adenosine
  misc_feature (3)..(3): 2'-deoxy Guanosine
  misc_feature (7)..(8): 2'-deoxy Guanosine
  misc_feature (17)..(17): 2'-deoxy Guanosine
  misc_feature (1)..(19): ribonucleotide unmodified or modified as described for this sequence
cagcuuggaacaccauguctt

SEQ ID NO: 1194 - DNA, 21 bp, Artificial Sequence
  Synthetic
  misc_feature (1)..(1): 5'-3 attached terminal deoxyabasic moiety
  misc_feature (21)..(21): 3'-3 attached terminal deoxyabasic moiety
  misc_feature (3)..(5): 2'-deoxy-2'-fluoro cytidine
  misc_feature (8)..(8): 2'-deoxy-2'-fluoro cytidine
  misc_feature (12)..(12): 2'-deoxy-2'-fluoro cytidine
  misc_feature (14)..(14): 2'-deoxy-2'-fluoro cytidine
  misc_feature (19)..(19): 2'-deoxy-2'-fluoro cytidine
  misc_feature (1)..(2): 2'-deoxy-2'-fluoro uridine
  misc_feature (9)..(9): 2'-deoxy-2'-fluoro uridine
  misc_feature (13)..(13): 2'-deoxy-2'-fluoro uridine
  misc_feature (6)..(6): 2'-deoxy Adenosine
  misc_feature (11)..(11): 2'-deoxy Adenosine
  misc_feature (15)..(15): 2'-deoxy Adenosine
  misc_feature (17)..(18): 2'-deoxy Adenosine
  misc_feature (7)..(7): 2'-deoxy Guanosine
  misc_feature (10)..(10): 2'-deoxy Guanosine
  misc_feature (16)..(16): 2'-deoxy Guanosine
  misc_feature (1)..(19): ribonucleotide unmodified or modified as described for this sequence
uucccagcugacucagaactt

SEQ ID NO: 1195 - DNA, 21 bp, Artificial Sequence
  Synthetic
  misc_feature (1)..(1): 5'-3 attached terminal deoxyabasic moiety
  misc_feature (21)..(21): 3'-3 attached terminal deoxyabasic moiety
  misc_feature (5)..(5): 2'-deoxy-2'-fluoro cytidine
  misc_feature (8)..(8): 2'-deoxy-2'-fluoro cytidine
  misc_feature (13)..(14): 2'-deoxy-2'-fluoro cytidine
  misc_feature (17)..(17): 2'-deoxy-2'-fluoro cytidine
  misc_feature (2)..(2): 2'-deoxy-2'-fluoro uridine
  misc_feature (4)..(4): 2'-deoxy-2'-fluoro uridine
  misc_feature (12)..(12): 2'-deoxy-2'-fluoro uridine
  misc_feature (18)..(19): 2'-deoxy-2'-fluoro uridine
  misc_feature (1)..(1): 2'-deoxy Adenosine
  misc_feature (6)..(7): 2'-deoxy Adenosine
  misc_feature (9)..(9): 2'-deoxy Adenosine
  misc_feature (11)..(11): 2'-deoxy Adenosine
  misc_feature (16)..(16): 2'-deoxy Adenosine
  misc_feature (3)..(3): 2'-deoxy Guanosine
  misc_feature (10)..(10): 2'-deoxy Guanosine
  misc_feature (15)..(15): 2'-deoxy Guanosine
  misc_feature (1)..(19): ribonucleotide unmodified or modified as described for this sequence
augucaacagauccgacuutt

SEQ ID NO: 1196 - DNA, 21 bp, Artificial Sequence
  Synthetic
  misc_feature (1)..(1): 5'-3 attached terminal deoxyabasic moiety
  misc_feature (21)..(21): 3'-3 attached terminal deoxyabasic moiety
  misc_feature (5)..(6): 2'-deoxy-2'-fluoro cytidine
  misc_feature (8)..(8): 2'-deoxy-2'-fluoro cytidine
  misc_feature (14)..(14): 2'-deoxy-2'-fluoro cytidine
  misc_feature (18)..(18): 2'-deoxy-2'-fluoro cytidine
  misc_feature (1)..(2): 2'-deoxy-2'-fluoro uridine
  misc_feature (7)..(7): 2'-deoxy-2'-fluoro uridine
  misc_feature (9)..(9): 2'-deoxy-2'-fluoro uridine
  misc_feature (12)..(12): 2'-deoxy-2'-fluoro uridine
  misc_feature (11)..(11): 2'-deoxy Adenosine
  misc_feature (13)..(13): 2'-deoxy Adenosine
  misc_feature (15)..(15): 2'-deoxy Adenosine
  misc_feature (17)..(17): 2'-deoxy Adenosine
  misc_feature (19)..(19): 2'-deoxy Adenosine
  misc_feature (3)..(4): 2'-deoxy Guanosine
  misc_feature (10)..(10): 2'-deoxy Guanosine
  misc_feature (16)..(16): 2'-deoxy Guanosine
  misc_feature (1)..(19): ribonucleotide unmodified or modified as described for this sequence
uuggccucugauacagacatt

SEQ ID NO: 1197 - DNA, 21 bp, Artificial Sequence
  Synthetic
  misc_feature (3)..(3): 2'-deoxy-2'-fluoro cytidine
  misc_feature (12)..(13): 2'-deoxy-2'-fluoro cytidine
  misc_feature (17)..(17): 2'-deoxy-2'-fluoro cytidine
  misc_feature (5)..(5): 2'-deoxy-2'-fluoro uridine
  misc_feature (8)..(8): 2'-deoxy-2'-fluoro uridine
  misc_feature (10)..(11): 2'-deoxy-2'-fluoro uridine
  misc_feature (18)..(18): 2'-deoxy-2'-fluoro uridine
  misc_feature (2)..(2): 2'-deoxy Adenosine
  misc_feature (4)..(4): 2'-deoxy Adenosine
  misc_feature (14)..(15): 2'-deoxy Adenosine
  misc_feature (1)..(1): 2'-deoxy Guanosine
  misc_feature (6)..(7): 2'-deoxy Guanosine
  misc_feature (9)..(9): 2'-deoxy Guanosine
  misc_feature (16)..(16): 2'-deoxy Guanosine
  misc_feature (19)..(19): 2'-deoxy Guanosine
  misc_feature (20)..(20): Phosphorothioate 3'-Internucleotide Linkage
  misc_feature (1)..(19): ribonucleotide unmodified or modified as described for this sequence
gacaugguguuccaagcugtt

SEQ ID NO: 1198 - DNA, 21 bp, Artificial Sequence
  Synthetic
  misc_feature (4)..(4): 2'-deoxy-2'-fluoro cytidine
  misc_feature (10)..(10): 2'-deoxy-2'-fluoro cytidine
  misc_feature (13)..(13): 2'-deoxy-2'-fluoro cytidine
  misc_feature (2)..(3): 2'-deoxy-2'-fluoro uridine
  misc_feature (5)..(5): 2'-deoxy-2'-fluoro uridine
  misc_feature (9)..(9): 2'-deoxy-2'-fluoro uridine
  misc_feature (14)..(14): 2'-deoxy-2'-fluoro uridine
  misc_feature (7)..(7): 2'-deoxy Adenosine
  misc_feature (11)..(11): 2'-deoxy Adenosine
  misc_feature (18)..(19): 2'-deoxy Adenosine
  misc_feature (1)..(1): 2'-deoxy Guanosine
  misc_feature (6)..(6): 2'-deoxy Guanosine
  misc_feature (8)..(8): 2'-deoxy Guanosine
  misc_feature (12)..(12): 2'-deoxy Guanosine
  misc_feature (15)..(17): 2'-deoxy Guanosine
  misc_feature (20)..(20): Phosphorothioate 3'-Internucleotide Linkage
  misc_feature (1)..(19): ribonucleotide unmodified or modified as described for this sequence
guucugagucagcugggaatt

SEQ ID NO: 1199 - DNA, 21 bp, Artificial Sequence
  Synthetic
  misc_feature (5)..(5): 2'-deoxy-2'-fluoro cytidine
  misc_feature (10)..(10): 2'-deoxy-2'-fluoro cytidine
  misc_feature (17)..(17): 2'-deoxy-2'-fluoro cytidine
  misc_feature (4)..(4): 2'-deoxy-2'-fluoro uridine
  misc_feature (9)..(9): 2'-deoxy-2'-fluoro uridine
  misc_feature (11)..(11): 2'-deoxy-2'-fluoro uridine
  misc_feature (13)..(14): 2'-deoxy-2'-fluoro uridine
  misc_feature (19)..(19): 2'-deoxy-2'-fluoro uridine
  misc_feature (1)..(2): 2'-deoxy Adenosine
  misc_feature (8)..(8): 2'-deoxy Adenosine
  misc_feature (16)..(16): 2'-deoxy Adenosine
  misc_feature (18)..(18): 2'-deoxy Adenosine
  misc_feature (3)..(3): 2'-deoxy Guanosine
  misc_feature (6)..(7): 2'-deoxy Guanosine
  misc_feature (12)..(12): 2'-deoxy Guanosine
  misc_feature (15)..(15): 2'-deoxy Guanosine
  misc_feature (20)..(20): Phosphorothioate 3'-Internucleotide Linkage
  misc_feature (1)..(19): ribonucleotide unmodified or modified as described for this sequence
aagucggaucuguugacautt

SEQ ID NO: 1200 - DNA, 21 bp, Artificial Sequence
  Synthetic
  misc_feature (4)..(4): 2'-deoxy-2'-fluoro cytidine
  misc_feature (10)..(10): 2'-deoxy-2'-fluoro cytidine
  misc_feature (16)..(17): 2'-deoxy-2'-fluoro cytidine
  misc_feature (1)..(1): 2'-deoxy-2'-fluoro uridine
  misc_feature (3)..(3): 2'-deoxy-2'-fluoro uridine
  misc_feature (5)..(5): 2'-deoxy-2'-fluoro uridine
  misc_feature (7)..(7): 2'-deoxy-2'-fluoro uridine
  misc_feature (9)..(9): 2'-deoxy-2'-fluoro uridine
  misc_feature (8)..(8): 2'-deoxy Adenosine
  misc_feature (11)..(11): 2'-deoxy Adenosine
  misc_feature (13)..(13): 2'-deoxy Adenosine
  misc_feature (18)..(19): 2'-deoxy Adenosine
  misc_feature (2)..(2): 2'-deoxy Guanosine
  misc_feature (6)..(6): 2'-deoxy Guanosine
  misc_feature (12)..(12): 2'-deoxy Guanosine
  misc_feature (14)..(15): 2'-deoxy Guanosine
  misc_feature (20)..(20): Phosphorothioate 3'-Internucleotide Linkage
  misc_feature (1)..(19): ribonucleotide unmodified or modified as described for this sequence
ugucuguaucagaggccaatt

SEQ ID NO: 1201 - DNA, 21 bp, Artificial Sequence
  Synthetic
  misc_feature (1)..(19): ribonucleotide unmodified or modified as described for this sequence
cuacuuugcucaguaccactt

SEQ ID NO: 1202 - DNA, 21 bp, Artificial Sequence
  Synthetic
  misc_feature (1)..(19): ribonucleotide unmodified or modified as described for this sequence
ucugucuuugugggagggutt

SEQ ID NO: 1203 - DNA, 21 bp, Artificial Sequence
  Synthetic
  misc_feature (1)..(19): ribonucleotide unmodified or modified as described for this sequence
aagggucuucuuggcagcutt

SEQ ID NO: 1204 - DNA, 21 bp, Artificial Sequence
  Synthetic
  misc_feature (1)..(19): ribonucleotide unmodified or modified as described for this sequence
acucuaagcuggagcucuutt

SEQ ID NO: 1205 - DNA, 21 bp, Artificial Sequence
  Synthetic
  misc_feature (1)..(19): ribonucleotide unmodified or modified as described for this sequence
gugguacugagcaaaguagtt

SEQ ID NO: 1206 - DNA, 21 bp, Artificial Sequence
  Synthetic
  misc_feature (1)..(19): ribonucleotide unmodified or modified as described for this sequence
acccucccacaaagacagatt

SEQ ID NO: 1207 - DNA, 21 bp, Artificial Sequence
  Synthetic
  misc_feature (1)..(19): ribonucleotide unmodified or modified as described for this sequence
agcugccaagaagacccuutt

SEQ ID NO: 1208 - DNA, 21 bp, Artificial Sequence
  Synthetic
  misc_feature (1)..(19): ribonucleotide unmodified or modified as described for this sequence
aagagcuccagcuuagagutt

SEQ ID NO: 1209 - DNA, 21 bp, Artificial Sequence
  Synthetic
  misc_feature (1)..(1): 5'-3 attached terminal deoxyabasic moiety
  misc_feature (21)..(21): 3'-3 attached terminal deoxyabasic moiety
  misc_feature (1)..(1): 2'-deoxy-2'-fluoro cytidine
  misc_feature (4)..(4): 2'-deoxy-2'-fluoro cytidine
  misc_feature (9)..(9): 2'-deoxy-2'-fluoro cytidine
  misc_feature (11)..(11): 2'-deoxy-2'-fluoro cytidine
  misc_feature (16)..(17): 2'-deoxy-2'-fluoro cytidine
  misc_feature (19)..(19): 2'-deoxy-2'-fluoro cytidine
  misc_feature (2)..(2): 2'-deoxy-2'-fluoro uridine
  misc_feature (5)..(7): 2'-deoxy-2'-fluoro uridine
  misc_feature (10)..(10): 2'-deoxy-2'-fluoro uridine
  misc_feature (14)..(14): 2'-deoxy-2'-fluoro uridine
  misc_feature (1)..(19): ribonucleotide unmodified or modified as described for this sequence
cuacuuugcucaguaccactt

SEQ ID NO: 1210 - DNA, 21 bp, Artificial Sequence
  Synthetic
  misc_feature (1)..(1): 5'-3 attached terminal deoxyabasic moiety
  misc_feature (21)..(21): 3'-3 attached terminal deoxyabasic moiety
  misc_feature (2)..(2): 2'-deoxy-2'-fluoro cytidine
  misc_feature (6)..(6): 2'-deoxy-2'-fluoro cytidine
  misc_feature (1)..(1): 2'-deoxy-2'-fluoro uridine
  misc_feature (3)..(3): 2'-deoxy-2'-fluoro uridine
  misc_feature (5)..(5): 2'-deoxy-2'-fluoro uridine
  misc_feature (7)..(9): 2'-deoxy-2'-fluoro uridine
  misc_feature (11)..(11): 2'-deoxy-2'-fluoro uridine
  misc_feature (19)..(19): 2'-deoxy-2'-fluoro uridine
  misc_feature (1)..(19): ribonucleotide unmodified or modified as described for this sequence
ucugucuuugugggagggutt

SEQ ID NO: 1211 - DNA, 21 bp, Artificial Sequence
  Synthetic
  misc_feature (1)..(1): 5'-3 attached terminal deoxyabasic moiety
  misc_feature (21)..(21): 3'-3 attached terminal deoxyabasic moiety
  misc_feature (7)..(7): 2'-deoxy-2'-fluoro cytidine
  misc_feature (10)..(10): 2'-deoxy-2'-fluoro cytidine
  misc_feature (15)..(15): 2'-deoxy-2'-fluoro cytidine
  misc_feature (18)..(18): 2'-deoxy-2'-fluoro cytidine
  misc_feature (6)..(6): 2'-deoxy-2'-fluoro uridine
  misc_feature (8)..(9): 2'-deoxy-2'-fluoro uridine
  misc_feature (11)..(12): 2'-deoxy-2'-fluoro uridine
  misc_feature (19)..(19): 2'-deoxy-2'-fluoro uridine
  misc_feature (1)..(19): ribonucleotide unmodified or modified as described for this sequence
aagggucuucuuggcagcutt

SEQ ID NO: 1212 - DNA, 21 bp, Artificial Sequence
  Synthetic
  misc_feature (1)..(1): 5'-3 attached terminal deoxyabasic moiety
  misc_feature (21)..(21): 3'-3 attached terminal deoxyabasic moiety
  misc_feature (2)..(2): 2'-deoxy-2'-fluoro cytidine
  misc_feature (4)..(4): 2'-deoxy-2'-fluoro cytidine
  misc_feature (9)..(9): 2'-deoxy-2'-fluoro cytidine
  misc_feature (15)..(15): 2'-deoxy-2'-fluoro cytidine
  misc_feature (17)..(17): 2'-deoxy-2'-fluoro cytidine
  misc_feature (3)..(3): 2'-deoxy-2'-fluoro uridine
  misc_feature (5)..(5): 2'-deoxy-2'-fluoro uridine
  misc_feature (10)..(10): 2'-deoxy-2'-fluoro uridine
  misc_feature (16)..(16): 2'-deoxy-2'-fluoro uridine
  misc_feature (18)..(19): 2'-deoxy-2'-fluoro uridine
  misc_feature (1)..(19): ribonucleotide unmodified or modified as described for this sequence
acucuaagcuggagcucuutt

SEQ ID NO: 1213 - DNA, 21 bp, Artificial Sequence
  Synthetic
  misc_feature (7)..(7): 2'-deoxy-2'-fluoro cytidine
  misc_feature (12)..(12): 2'-deoxy-2'-fluoro cytidine
  misc_feature (2)..(2): 2'-deoxy-2'-fluoro uridine
  misc_feature (5)..(5): 2'-deoxy-2'-fluoro uridine
  misc_feature (8)..(8): 2'-deoxy-2'-fluoro uridine
  misc_feature (17)..(17): 2'-deoxy-2'-fluoro uridine
  misc_feature (20)..(20): Phosphorothioate 3'-Internucleotide Linkage
  misc_feature (1)..(19): ribonucleotide unmodified or modified as described for this sequence
gugguacugagcaaaguagtt

SEQ ID NO: 1214 - DNA, 21 bp, Artificial Sequence
  Synthetic
  misc_feature (2)..(4): 2'-deoxy-2'-fluoro cytidine
  misc_feature (6)..(8): 2'-deoxy-2'-fluoro cytidine
  misc_feature (10)..(10): 2'-deoxy-2'-fluoro cytidine
  misc_feature (14)..(14): 2'-deoxy-2'-fluoro cytidine
  misc_feature (5)..(5): 2'-deoxy-2'-fluoro uridine
  misc_feature (20)..(20): Phosphorothioate 3'-Internucleotide Linkage
  misc_feature (1)..(19): ribonucleotide unmodified or modified as described for this sequence
acccucccacaaagacagatt

SEQ ID NO: 1215 - DNA, 21 bp, Artificial Sequence
  Synthetic
  misc_feature (3)..(3): 2'-deoxy-2'-fluoro cytidine
  misc_feature (6)..(7): 2'-deoxy-2'-fluoro cytidine
  misc_feature (15)..(17): 2'-deoxy-2'-fluoro cytidine
  misc_feature (4)..(4): 2'-deoxy-2'-fluoro uridine
  misc_feature (18)..(19): 2'-deoxy-2'-fluoro uridine
  misc_feature (20)..(20): Phosphorothioate 3'-Internucleotide Linkage
  misc_feature (1)..(19): ribonucleotide unmodified or modified as described for this sequence
agcugccaagaagacccuutt

SEQ ID NO: 1216 - DNA, 21 bp, Artificial Sequence
  Synthetic
  misc_feature (6)..(6): 2'-deoxy-2'-fluoro cytidine
  misc_feature (8)..(9): 2'-deoxy-2'-fluoro cytidine
  misc_feature (12)..(12): 2'-deoxy-2'-fluoro cytidine
  misc_feature (7)..(7): 2'-deoxy-2'-fluoro uridine
  misc_feature (13)..(14): 2'-deoxy-2'-fluoro uridine
  misc_feature (19)..(19): 2'-deoxy-2'-fluoro uridine
  misc_feature (20)..(20): Phosphorothioate 3'-Internucleotide Linkage
  misc_feature (1)..(19): ribonucleotide unmodified or modified as described for this sequence
aagagcuccagcuuagagutt

SEQ ID NO: 1217 - DNA, 21 bp, Artificial Sequence
  Synthetic
  misc_feature (1)..(1): 5'-3 attached terminal deoxyabasic moiety
  misc_feature (21)..(21): 3'-3 attached terminal deoxyabasic moiety
  misc_feature (1)..(1): 2'-deoxy-2'-fluoro cytidine
  misc_feature (4)..(4): 2'-deoxy-2'-fluoro cytidine
  misc_feature (9)..(9): 2'-deoxy-2'-fluoro cytidine
  misc_feature (11)..(11): 2'-deoxy-2'-fluoro cytidine
  misc_feature (16)..(17): 2'-deoxy-2'-fluoro cytidine
  misc_feature (19)..(19): 2'-deoxy-2'-fluoro cytidine
  misc_feature (2)..(2): 2'-deoxy-2'-fluoro uridine
  misc_feature (5)..(7): 2'-deoxy-2'-fluoro uridine
  misc_feature (10)..(10): 2'-deoxy-2'-fluoro uridine
  misc_feature (14)..(14): 2'-deoxy-2'-fluoro uridine
  misc_feature (3)..(3): 2'-deoxy Adenosine
  misc_feature (12)..(12): 2'-deoxy Adenosine
  misc_feature (15)..(15): 2'-deoxy Adenosine
  misc_feature (18)..(18): 2'-deoxy Adenosine
  misc_feature (8)..(8): 2'-deoxy Guanosine
  misc_feature (13)..(13): 2'-deoxy Guanosine
  misc_feature (1)..(19): ribonucleotide unmodified or modified as described for this sequence
cuacuuugcucaguaccactt

SEQ ID NO: 1218 - DNA, 21 bp, Artificial Sequence
  Synthetic
  misc_feature (1)..(1): 5'-3 attached terminal deoxyabasic moiety
  misc_feature (21)..(21): 3'-3 attached terminal deoxyabasic moiety
  misc_feature (2)..(2): 2'-deoxy-2'-fluoro cytidine
  misc_feature (6)..(6): 2'-deoxy-2'-fluoro cytidine
  misc_feature (1)..(1): 2'-deoxy-2'-fluoro uridine
  misc_feature (3)..(3): 2'-deoxy-2'-fluoro uridine
  misc_feature (5)..(5): 2'-deoxy-2'-fluoro uridine
  misc_feature (7)..(9): 2'-deoxy-2'-fluoro uridine
  misc_feature (11)..(11): 2'-deoxy-2'-fluoro uridine
  misc_feature (19)..(19): 2'-deoxy-2'-fluoro uridine
  misc_feature (15)..(15): 2'-deoxy Adenosine
  misc_feature (4)..(4): 2'-deoxy Guanosine
  misc_feature (10)..(10): 2'-deoxy Guanosine
  misc_feature (12)..(14): 2'-deoxy Guanosine
  misc_feature (16)..(18): 2'-deoxy Guanosine
  misc_feature (1)..(19): ribonucleotide unmodified or modified as described for this sequence
ucugucuuugugggagggutt

SEQ ID NO: 1219 - DNA, 21 bp, Artificial Sequence
  Synthetic
  misc_feature (1)..(1): 5'-3 attached terminal deoxyabasic moiety
  misc_feature (21)..(21): 3'-3 attached terminal deoxyabasic moiety
  misc_feature (7)..(7): 2'-deoxy-2'-fluoro cytidine
  misc_feature (10)..(10): 2'-deoxy-2'-fluoro cytidine
  misc_feature (15)..(15): 2'-deoxy-2'-fluoro cytidine
  misc_feature (18)..(18): 2'-deoxy-2'-fluoro cytidine
  misc_feature (6)..(6): 2'-deoxy-2'-fluoro uridine
  misc_feature (8)..(9): 2'-deoxy-2'-fluoro uridine
  misc_feature (11)..(12): 2'-deoxy-2'-fluoro uridine
  misc_feature (19)..(19): 2'-deoxy-2'-fluoro uridine
  misc_feature (1)..(2): 2'-deoxy Adenosine
  misc_feature (16)..(16): 2'-deoxy Adenosine
  misc_feature (3)..(5): 2'-deoxy Guanosine
  misc_feature (13)..(14): 2'-deoxy Guanosine
  misc_feature (17)..(17): 2'-deoxy Guanosine
  misc_feature (1)..(19): ribonucleotide unmodified or modified as described for this sequence
aagggucuucuuggcagcutt

SEQ ID NO: 1220 - DNA, 21 bp, Artificial Sequence
  Synthetic
  misc_feature (1)..(1): 5'-3 attached terminal deoxyabasic moiety
  misc_feature (21)..(21): 3'-3 attached terminal deoxyabasic moiety
  misc_feature (2)..(2): 2'-deoxy-2'-fluoro cytidine
  misc_feature (4)..(4): 2'-deoxy-2'-fluoro cytidine
  misc_feature (9)..(9): 2'-deoxy-2'-fluoro cytidine
  misc_feature (15)..(15): 2'-deoxy-2'-fluoro cytidine
  misc_feature (17)..(17): 2'-deoxy-2'-fluoro cytidine
  misc_feature (3)..(3): 2'-deoxy-2'-fluoro uridine
  misc_feature (5)..(5): 2'-deoxy-2'-fluoro uridine
  misc_feature (10)..(10): 2'-deoxy-2'-fluoro uridine
  misc_feature (16)..(16): 2'-deoxy-2'-fluoro uridine
  misc_feature (18)..(19): 2'-deoxy-2'-fluoro uridine
  misc_feature (1)..(1): 2'-deoxy Adenosine
  misc_feature (6)..(7): 2'-deoxy Adenosine
  misc_feature (13)..(13): 2'-deoxy Adenosine
  misc_feature (8)..(8): 2'-deoxy Guanosine
  misc_feature (11)..(12): 2'-deoxy Guanosine
  misc_feature (14)..(14): 2'-deoxy Guanosine
  misc_feature (1)..(19): ribonucleotide unmodified or modified as described for this sequence
acucuaagcuggagcucuutt

SEQ ID NO: 1221 - DNA, 21 bp, Artificial Sequence
  Synthetic
  misc_feature (7)..(7): 2'-deoxy-2'-fluoro cytidine
  misc_feature (12)..(12): 2'-deoxy-2'-fluoro cytidine
  misc_feature (2)..(2): 2'-deoxy-2'-fluoro uridine
  misc_feature (5)..(5): 2'-deoxy-2'-fluoro uridine
  misc_feature (8)..(8): 2'-deoxy-2'-fluoro uridine
  misc_feature (17)..(17): 2'-deoxy-2'-fluoro uridine
  misc_feature (6)..(6): 2'-deoxy Adenosine
  misc_feature (10)..(10): 2'-deoxy Adenosine
  misc_feature (13)..(15): 2'-deoxy Adenosine
  misc_feature (18)..(18): 2'-deoxy Adenosine
  misc_feature (1)..(1): 2'-deoxy Guanosine
  misc_feature (3)..(4): 2'-deoxy Guanosine
  misc_feature (9)..(9): 2'-deoxy Guanosine
  misc_feature (11)..(11): 2'-deoxy Guanosine
  misc_feature (16)..(16): 2'-deoxy Guanosine
  misc_feature (19)..(19): 2'-deoxy Guanosine
  misc_feature (20)..(20): Phosphorothioate 3'-Internucleotide Linkage
  misc_feature (1)..(19): ribonucleotide unmodified or modified as described for this sequence
gugguacugagcaaaguagtt

SEQ ID NO: 1222 - DNA, 21 bp, Artificial Sequence
  Synthetic
  misc_feature (2)..(4): 2'-deoxy-2'-fluoro cytidine
  misc_feature (6)..(8): 2'-deoxy-2'-fluoro cytidine
  misc_feature (10)..(10): 2'-deoxy-2'-fluoro cytidine
  misc_feature (16)..(16): 2'-deoxy-2'-fluoro cytidine
  misc_feature (5)..(5): 2'-deoxy-2'-fluoro uridine
  misc_feature (1)..(1): 2'-deoxy Adenosine
  misc_feature (9)..(9): 2'-deoxy Adenosine
  misc_feature (11)..(13): 2'-deoxy Adenosine
  misc_feature (15)..(15): 2'-deoxy Adenosine
  misc_feature (17)..(17): 2'-deoxy Adenosine
  misc_feature (19)..(19): 2'-deoxy Adenosine
  misc_feature (14)..(14): 2'-deoxy Guanosine
  misc_feature (18)..(18): 2'-deoxy Guanosine
  misc_feature (20)..(20): Phosphorothioate 3'-Internucleotide Linkage
  misc_feature (1)..(19): ribonucleotide unmodified or modified as described for this sequence
acccucccacaaagacagatt

SEQ ID NO: 1223 - DNA, 21 bp, Artificial Sequence
  Synthetic
  misc_feature (3)..(3): 2'-deoxy-2'-fluoro cytidine
  misc_feature (6)..(7): 2'-deoxy-2'-fluoro cytidine
  misc_feature (15)..(17): 2'-deoxy-2'-fluoro cytidine
  misc_feature (4)..(4): 2'-deoxy-2'-fluoro uridine
  misc_feature (18)..(19): 2'-deoxy-2'-fluoro uridine
  misc_feature (1)..(1): 2'-deoxy Adenosine
  misc_feature (8)..(9): 2'-deoxy Adenosine
  misc_feature (11)..(12): 2'-deoxy Adenosine
  misc_feature (14)..(14): 2'-deoxy Adenosine
  misc_feature (2)..(2): 2'-deoxy Guanosine
  misc_feature (5)..(5): 2'-deoxy Guanosine
  misc_feature (10)..(10): 2'-deoxy Guanosine
  misc_feature (13)..(13): 2'-deoxy Guanosine
  misc_feature (20)..(20): Phosphorothioate 3'-Internucleotide Linkage
  misc_feature (1)..(19): ribonucleotide unmodified or modified as described for this sequence
agcugccaagaagacccuutt

SEQ ID NO: 1224 - DNA, 21 bp, Artificial Sequence
  Synthetic
  misc_feature (6)..(6): 2'-deoxy-2'-fluoro cytidine
  misc_feature (8)..(9): 2'-deoxy-2'-fluoro cytidine
  misc_feature (12)..(12): 2'-deoxy-2'-fluoro cytidine
  misc_feature (7)..(7): 2'-deoxy-2'-fluoro uridine
  misc_feature (13)..(14): 2'-deoxy-2'-fluoro uridine
  misc_feature (19)..(19): 2'-deoxy-2'-fluoro uridine
  misc_feature (1)..(2): 2'-deoxy Adenosine
  misc_feature (4)..(4): 2'-deoxy Adenosine
  misc_feature (10)..(10): 2'-deoxy Adenosine
  misc_feature (15)..(15): 2'-deoxy Adenosine
  misc_feature (17)..(17): 2'-deoxy Adenosine
  misc_feature (3)..(3): 2'-deoxy Guanosine
  misc_feature (5)..(5): 2'-deoxy Guanosine
  misc_feature (11)..(11): 2'-deoxy Guanosine
  misc_feature (16)..(16): 2'-deoxy Guanosine
  misc_feature (18)..(18): 2'-deoxy Guanosine
  misc_feature (20)..(20): Phosphorothioate 3'-Internucleotide Linkage
  misc_feature (1)..(19): ribonucleotide unmodified or modified as described for this sequence
aagagcuccagcuuagagutt

SEQ ID NO: 1225-1246 - skipped (22 entries)

SEQ ID NO: 1247 - RNA, 19 nt, Artificial Sequence
  Synthetic
aguugcacugaguguggcu

SEQ ID NO: 1248 - RNA, 19 nt, Artificial Sequence
  Synthetic
ugaagcagcgaggcgggag

SEQ ID NO: 1249 - RNA, 19 nt, Artificial Sequence
  Synthetic
guggaggugcgcggaguca

SEQ ID NO: 1250 - RNA, 19 nt, Artificial Sequence
  Synthetic
aggcagacagacagacaca

SEQ ID NO: 1251 - RNA, 19 nt, Artificial Sequence
  Synthetic
agccagccagccaggucgg

SEQ ID NO: 1252 - RNA, 19 nt, Artificial Sequence
  Synthetic
gcaguauaguccgaacugc

SEQ ID NO: 1253 - RNA, 19 nt, Artificial Sequence
  Synthetic
caaaucuuauuuucuuuuc

SEQ ID NO: 1254 - RNA, 19 nt, Artificial Sequence
  Synthetic
caccuucucucuaacugcc

SEQ ID NO: 1255 - RNA, 19 nt, Artificial Sequence
  Synthetic
ccagagcuagcgccugugg

SEQ ID NO: 1256 - RNA, 19 nt, Artificial Sequence
  Synthetic
gcucccgggcuggugguuc

SEQ ID NO: 1257 - RNA, 19 nt, Artificial Sequence
  Synthetic
cgggaguguccagagagcc

SEQ ID NO: 1258 - RNA, 19 nt, Artificial Sequence
  Synthetic
cuugucuccagccggcccc

SEQ ID NO: 1259 - RNA, 19 nt, Artificial Sequence
  Synthetic
cgggaggagagcccugcug

SEQ ID NO: 1260 - RNA, 19 nt, Artificial Sequence
  Synthetic
gcccaggcgcuguugacag

SEQ ID NO: 1261 - RNA, 19 nt, Artificial Sequence
  Synthetic
gcggcggaaagcagcggua

SEQ ID NO: 1262 - RNA, 19 nt, Artificial Sequence
  Synthetic
accccacgcgcccgccggg

SEQ ID NO: 1263 - RNA, 19 nt, Artificial Sequence
  Synthetic
gggacgucggcgagcggcu

SEQ ID NO: 1264 - RNA, 19 nt, Artificial Sequence
  Synthetic
ugcagcagcaaagaacuuu

SEQ ID NO: 1265 - RNA, 19 nt, Artificial Sequence
  Synthetic
ucccggcggggaggaccgg

SEQ ID NO: 1266 - RNA, 19 nt, Artificial Sequence
  Synthetic
gagacaaguggcagagucc

SEQ ID NO: 1267 - RNA, 19 nt, Artificial Sequence
  Synthetic
ccggagcgaacuuuugcaa

SEQ ID NO: 1268 - RNA, 19 nt, Artificial Sequence
  Synthetic
agccuuuccugcgucuuag

SEQ ID NO: 1269 - RNA, 19 nt, Artificial Sequence
  Synthetic
ggcuucuccacggcgguaa

SEQ ID NO: 1270 - RNA, 19 nt, Artificial Sequence
  Synthetic
aagaccagaaggcggcgga

SEQ ID NO: 1271 - RNA, 19 nt, Artificial Sequence
  Synthetic
agagccacgcaagagaaga

SEQ ID NO: 1272 - RNA, 19 nt, Artificial Sequence
  Synthetic
aaggacgugcgcucagcuu

SEQ ID NO: 1273 - RNA, 19 nt, Artificial Sequence
  Synthetic
ucgcucgcaccgguuguug

SEQ ID NO: 1274 - RNA, 19 nt, Artificial Sequence
  Synthetic
gaacuugggcgagcgcgag

SEQ ID NO: 1275 - RNA, 19 nt, Artificial Sequence
  Synthetic
gccgcggcugccgggcgcc

SEQ ID NO: 1276 - RNA, 19 nt, Artificial Sequence
  Synthetic
ccccucccccuagcagcgg

SEQ ID NO: 1277 - RNA, 19 nt, Artificial Sequence
  Synthetic
gaggaggggacaagucguc

SEQ ID NO: 1278 - RNA, 19 nt, Artificial Sequence
  Synthetic
cggaguccgggcggccaag

SEQ ID NO: 1279 - RNA, 19 nt, Artificial Sequence
  Synthetic
gacccgccgccggccggcc

SEQ ID NO: 1280 - RNA, 19 nt, Artificial Sequence
  Synthetic
cacugcaggguccgcacug

SEQ ID NO: 1281 - RNA, 19 nt, Artificial Sequence
  Synthetic
gauccgcuccgcggggaga

SEQ ID NO: 1282 - RNA, 19 nt, Artificial Sequence
  Synthetic
agccgcugcucugggaagu

SEQ ID NO: 1283 - RNA, 19 nt, Artificial Sequence
  Synthetic
ugaguucgccugcggacuc

SEQ ID NO: 1284 - RNA, 19 nt, Artificial Sequence
  Synthetic
ccgaggaaccgcugcgccc

SEQ ID NO: 1285 - RNA, 19 nt, Artificial Sequence
  Synthetic
cgaagagcgcucagugagu

SEQ ID NO: 1286 - RNA, 19 nt, Artificial Sequence
  Synthetic
ugaccgcgacuuuucaaag

SEQ ID NO: 1287 - RNA, 19 nt, Artificial Sequence
  Synthetic
gccggguagcgcgcgcgag

SEQ ID NO: 1288 - RNA, 19 nt, Artificial Sequence
  Synthetic
gucgacaaguaagagugcg

SEQ ID NO: 1289 - RNA, 19 nt, Artificial Sequence
  Synthetic
gggaggcaucuuaauuaac

SEQ ID NO: 1290 - RNA, 19 nt, Artificial Sequence
  Synthetic
cccugcgcucccuggagcg

SEQ ID NO: 1291 - RNA, 19 nt, Artificial Sequence
  Synthetic
gagcuggugaggagggcgc

SEQ ID NO: 1292 - RNA, 19 nt, Artificial Sequence
  Synthetic
cagcggggacgacagccag

SEQ ID NO: 1293 - RNA, 19 nt, Artificial Sequence
  Synthetic
gcgggugcgugcgcucuua

SEQ ID NO: 1294 - RNA, 19 nt, Artificial Sequence
  Synthetic
agagaaacuuucccuguca

SEQ ID NO: 1295 - RNA, 19 nt, Artificial Sequence
  Synthetic
aaaggcuccggggggcgcg

SEQ ID NO: 1296 - RNA, 19 nt, Artificial Sequence
  Synthetic
gggugucccccgcuugcca

SEQ ID NO: 1297 - RNA, 19 nt, Artificial Sequence
  Synthetic
agagcccuguugcggcccc

SEQ ID NO: 1298 - RNA, 19 nt, Artificial Sequence
  Synthetic
cgaaacuugugcgcgcacg

SEQ ID NO: 1299 - RNA, 19 nt, Artificial Sequence
  Synthetic
gccaaacuaaccucacgug

SEQ ID NO: 1300 - RNA, 19 nt, Artificial Sequence
  Synthetic
gaagugacggacuguucua

SEQ ID NO: 1301 - RNA, 19 nt, Artificial Sequence
  Synthetic
augacugcaaagauggaaa

SEQ ID NO: 1302 - RNA, 19 nt, Artificial Sequence
  Synthetic
acgaccuucuaugacgaug

SEQ ID NO: 1303 - RNA, 19 nt, Artificial Sequence
  Synthetic
gcccucaacgccucguucc

SEQ ID NO: 1304 - RNA, 19 nt, Artificial Sequence
  Synthetic
cucccguccgagagcggac

SEQ ID NO: 1305 - RNA, 19 nt, Artificial Sequence
  Synthetic
ccuuauggcuacaguaacc

SEQ ID NO: 1306 - RNA, 19 nt, Artificial Sequence
  Synthetic
cccaagauccugaaacaga

SEQ ID NO: 1307 - RNA, 19 nt, Artificial Sequence
  Synthetic
agcaugacccugaaccugg

SEQ ID NO: 1308 - RNA, 19 nt, Artificial Sequence
  Synthetic
gccgacccaguggggagcc

SEQ ID NO: 1309 - RNA, 19 nt, Artificial Sequence
  Synthetic
cugaagccgcaccuccgcg

SEQ ID NO: 1310 - RNA, 19 nt, Artificial Sequence
  Synthetic
gccaagaacucggaccucc

SEQ ID NO: 1311 - RNA, 19 nt, Artificial Sequence
  Synthetic
cucaccucgcccgacgugg

SEQ ID NO: 1312 - RNA, 19 nt, Artificial Sequence
  Synthetic
gggcugcucaagcuggcgu

SEQ ID NO: 1313 - RNA, 19 nt, Artificial Sequence
  Synthetic
ucgcccgagcuggagcgcc

SEQ ID NO: 1314 - RNA, 19 nt, Artificial Sequence
  Synthetic
cugauaauccaguccagca

SEQ ID NO: 1315 - RNA, 19 nt, Artificial Sequence
  Synthetic
aacgggcacaucaccacca

SEQ ID NO: 1316 - RNA, 19 nt, Artificial Sequence
  Synthetic
acgccgacccccacccagu

SEQ ID NO: 1317 - RNA, 19 nt, Artificial Sequence
  Synthetic
uuccugugccccaagaacg

SEQ ID NO: 1318 - RNA, 19 nt, Artificial Sequence
  Synthetic
gugacagaugagcaggagg

SEQ ID NO: 1319 - RNA, 19 nt, Artificial Sequence
  Synthetic
ggguucgccgagggcuucg

SEQ ID NO: 1320 - RNA, 19 nt, Artificial Sequence
  Synthetic
gugcgcgcccuggccgaac

SEQ ID NO: 1321 - RNA, 19 nt, Artificial Sequence
  Synthetic
cugcacagccagaacacgc

SEQ ID NO: 1322 - RNA, 19 nt, Artificial Sequence
  Synthetic
cugcccagcgucacgucgg

SEQ ID NO: 1323 - RNA, 19 nt, Artificial Sequence
  Synthetic
gcggcgcagccggucaacg

SEQ ID NO: 1324 - RNA, 19 nt, Artificial Sequence
  Synthetic
ggggcaggcaugguggcuc

SEQ ID NO: 1325 - RNA, 19 nt, Artificial Sequence
  Synthetic
cccgcgguagccucggugg

SEQ ID NO: 1326 - RNA, 19 nt, Artificial Sequence
  Synthetic
gcagggggcagcggcagcg

SEQ ID NO: 1327 - RNA, 19 nt, Artificial Sequence
  Synthetic
ggcggcuucagcgccagcc

SEQ ID NO: 1328 - RNA, 19 nt, Artificial Sequence
  Synthetic
cugcacagcgagccgccgg

SEQ ID NO: 1329 - RNA, 19 nt, Artificial Sequence
  Synthetic
gucuacgcaaaccucagca

SEQ ID NO: 1330 - RNA, 19 nt, Artificial Sequence
  Synthetic
aacuucaacccaggcgcgc

SEQ ID NO: 1331 - RNA, 19 nt, Artificial Sequence
  Synthetic
cugagcagcggcggcgggg

SEQ ID NO: 1332 - RNA, 19 nt, Artificial Sequence
  Synthetic
gcgcccuccuacggcgcgg

SEQ ID NO: 1333 - RNA, 19 nt, Artificial Sequence
  Synthetic
gccggccuggccuuucccg

SEQ ID NO: 1334 - RNA, 19 nt, Artificial Sequence
  Synthetic
gcgcaaccccagcagcagc

SEQ ID NO: 1335 - RNA, 19 nt, Artificial Sequence
  Synthetic
cagcagccgccgcaccacc

SEQ ID NO: 1336 - RNA, 19 nt, Artificial Sequence
  Synthetic
cugccccagcagaugcccg

SEQ ID NO: 1337 - RNA, 19 nt, Artificial Sequence
  Synthetic
gugcagcacccgcggcugc

SEQ ID NO: 1338 - RNA, 19 nt, Artificial Sequence
  Synthetic
caggcccugaaggaggagc

SEQ ID NO: 1339 - RNA, 19 nt, Artificial Sequence
  Synthetic
ccucagacagugcccgaga

SEQ ID NO: 1340 - RNA, 19 nt, Artificial Sequence
  Synthetic
augcccggcgagacaccgc

SEQ ID NO: 1341 - RNA, 19 nt, Artificial Sequence
  Synthetic
ccccugucccccaucgaca

SEQ ID NO: 1342 - RNA, 19 nt, Artificial Sequence
  Synthetic
auggagucccaggagcgga

SEQ ID NO: 1343 - RNA, 19 nt, Artificial Sequence
  Synthetic
aucaaggcggagaggaagc

SEQ ID NO: 1344 - RNA, 19 nt, Artificial Sequence
  Synthetic
cgcaugaggaaccgcaucg

SEQ ID NO: 1345 - RNA, 19 nt, Artificial Sequence
  Synthetic
gcugccuccaagugccgaa

SEQ ID NO: 1346 - RNA, 19 nt, Artificial Sequence
  Synthetic
aaaaggaagcuggagagaa

SEQ ID NO: 1347 - RNA, 19 nt, Artificial Sequence
  Synthetic
aucgcccggcuggaggaaa

SEQ ID NO: 1348 - RNA, 19 nt, Artificial Sequence
  Synthetic
aaagugaaaaccuugaaag

SEQ ID NO: 1349 - RNA, 19 nt, Artificial Sequence
  Synthetic
gcucagaacucggagcugg

SEQ ID NO: 1350 - RNA, 19 nt, Artificial Sequence
  Synthetic
gcguccacggccaacaugc

SEQ ID NO: 1351 - RNA, 19 nt, Artificial Sequence
  Synthetic
cucagggaacagguggcac

SEQ ID NO: 1352 - RNA, 19 nt, Artificial Sequence
  Synthetic
cagcuuaaacagaaaguca

SEQ ID NO: 1353 - RNA, 19 nt, Artificial Sequence
  Synthetic
augaaccacguuaacagug

SEQ ID NO: 1354 - RNA, 19 nt, Artificial Sequence
  Synthetic
gggugccaacucaugcuaa

SEQ ID NO: 1355 - RNA, 19 nt, Artificial Sequence
  Synthetic
acgcagcaguugcaaacau

SEQ ID NO: 1356 - RNA, 19 nt, Artificial Sequence
  Synthetic
uuuugaagagagaccgucg

SEQ ID NO: 1357 - RNA, 19 nt, Artificial Sequence
  Synthetic
gggggcugaggggcaacga

SEQ ID NO: 1358 - RNA, 19 nt, Artificial Sequence
  Synthetic
aagaaaaaaaauaacacag

SEQ ID NO: 1359 - RNA, 19 nt, Artificial Sequence
  Synthetic
gagagacagacuugagaac

SEQ ID NO: 1360 - RNA, 19 nt, Artificial Sequence
  Synthetic
cuugacaaguugcgacgga

SEQ ID NO: 1361 - RNA, 19 nt, Artificial Sequence
  Synthetic
agagaaaaaagaagugucc

SEQ ID NO: 1362 - RNA, 19 nt, Artificial Sequence
  Synthetic
cgagaacuaaagccaaggg

SEQ ID NO: 1363 - RNA, 19 nt, Artificial Sequence
  Synthetic
guauccaaguuggacuggg

SEQ ID NO: 1364 - RNA, 19 nt, Artificial Sequence
  Synthetic
guucggucugacggcgccc

SEQ ID NO: 1365 - RNA, 19 nt, Artificial Sequence
  Synthetic
cccagugugcacgaguggg

SEQ ID NO: 1366 - RNA, 19 nt, Artificial Sequence
  Synthetic
gaaggacuuggucgcgccc

SEQ ID NO: 1367 - RNA, 19 nt, Artificial Sequence
  Synthetic
cucccuuggcguggagcca

SEQ ID NO: 1368 - RNA, 19 nt, Artificial Sequence
  Synthetic
agggagcggccgccugcgg

SEQ ID NO: 1369 - RNA, 19 nt, Artificial Sequence
  Synthetic
ggcugccccgcuuugcgga

SEQ ID NO: 1370 - RNA, 19 nt, Artificial Sequence
  Synthetic
acgggcuguccccgcgcga

SEQ ID NO: 1371 - RNA, 19 nt, Artificial Sequence
  Synthetic
aacggaacguuggacuuuc

SEQ ID NO: 1372 - RNA, 19 nt, Artificial Sequence
  Synthetic
cguuaacauugaccaagaa

SEQ ID NO: 1373 - RNA, 19 nt, Artificial Sequence
  Synthetic
acugcauggaccuaacauu

SEQ ID NO: 1374 - RNA, 19 nt, Artificial Sequence
  Synthetic
ucgaucucauucaguauua

SEQ ID NO: 1375 - RNA, 19 nt, Artificial Sequence
  Synthetic
aaaggggggagggggaggg

SEQ ID NO: 1376 - RNA, 19 nt, Artificial Sequence
  Synthetic
ggguuacaaacugcaauag

SEQ ID NO: 1377 - RNA, 19 nt, Artificial Sequence
  Synthetic
gagacuguagauugcuucu

SEQ ID NO: 1378 - RNA, 19 nt, Artificial Sequence
  Synthetic
uguaguacuccuuaagaac

SEQ ID NO: 1379 - RNA, 19 nt, Artificial Sequence
  Synthetic
cacaaagcggggggagggu

SEQ ID NO: 1380 - RNA, 19 nt, Artificial Sequence
  Synthetic
uuggggaggggcggcagga

SEQ ID NO: 1381 - RNA, 19 nt, Artificial Sequence
  Synthetic
agggagguuugugagagcg

SEQ ID NO: 1382 - RNA, 19 nt, Artificial Sequence
  Synthetic
gaggcugagccuacagaug

SEQ ID NO: 1383 - RNA, 19 nt, Artificial Sequence
  Synthetic
gaacucuuucuggccugcu

SEQ ID NO: 1384 - RNA, 19 nt, Artificial Sequence
  Synthetic
uuucguuaacuguguaugu

SEQ ID NO: 1385 - RNA, 19 nt, Artificial Sequence
  Synthetic
uacauauauauauuuuuua

SEQ ID NO: 1386 - RNA, 19 nt, Artificial Sequence
  Synthetic
aauuugauuaaagcugauu

SEQ ID NO: 1387 - RNA, 19 nt, Artificial Sequence
  Synthetic
uacugucaauaaacagcuu

SEQ ID NO: 1388 - RNA, 19 nt, Artificial Sequence
  Synthetic
ucaugccuuuguaaguuau

SEQ ID NO: 1389 - RNA, 19 nt, Artificial Sequence
  Synthetic
uuucuuguuuguuuguuug

SEQ ID NO: 1390 - RNA, 19 nt, Artificial Sequence
  Synthetic
ggguauccugcccaguguu

SEQ ID NO: 1391 - RNA, 19 nt, Artificial Sequence
  Synthetic
uguuuguaaauaagagauu

SEQ ID NO: 1392 - RNA, 19 nt, Artificial Sequence
  Synthetic
uuggagcacucugaguuua

SEQ ID NO: 1393 - RNA, 19 nt, Artificial Sequence
  Synthetic
accauuuguaauaaaguau

SEQ ID NO: 1394 - RNA, 19 nt, Artificial Sequence
  Synthetic
uauaauuuuuuuauguuuu

SEQ ID NO: 1395 - RNA, 19 nt, Artificial Sequence
  Synthetic
uguuucugaaaauuccaga

SEQ ID NO: 1396 - RNA, 19 nt, Artificial Sequence
  Synthetic
aaaggauauuuaagaaaau

SEQ ID NO: 1397 - RNA, 19 nt, Artificial Sequence
  Synthetic
uacaauaaacuauuggaaa

SEQ ID NO: 1398 - RNA, 19 nt, Artificial Sequence
  Synthetic
aguacuccccuaaccucuu

SEQ ID NO: 1399 - RNA, 19 nt, Artificial Sequence
  Synthetic
uuucugcaucaucuguaga

SEQ ID NO: 1400 - RNA, 19 nt, Artificial Sequence
  Synthetic
auccuagucuaucuaggug

SEQ ID NO: 1401 - RNA, 19 nt, Artificial Sequence
  Synthetic
ggaguugaaagaguuaaga

SEQ ID NO: 1402 - RNA, 19 nt, Artificial Sequence
  Synthetic
aaugcucgauaaaaucacu

SEQ ID NO: 1403 - RNA, 19 nt, Artificial Sequence
  Synthetic
ucucagugcuucuuacuau

SEQ ID NO: 1404 - RNA, 19 nt, Artificial Sequence
  Synthetic
uuaagcaguaaaaacuguu

SEQ ID NO: 1405 - RNA, 19 nt, Artificial Sequence
  Synthetic
ucucuauuagacuuagaaa

SEQ ID NO: 1406 - RNA, 19 nt, Artificial Sequence
  Synthetic
auaaauguaccugauguac

SEQ ID NO: 1407 - RNA, 19 nt, Artificial Sequence
  Synthetic
ccugaugcuaugucaggcu

SEQ ID NO: 1408 - RNA, 19 nt, Artificial Sequence
  Synthetic
uucauacuccacgcucccc

SEQ ID NO: 1409 - RNA, 19 nt, Artificial Sequence
  Synthetic
ccagcguaucuauauggaa

SEQ ID NO: 1410 - RNA, 19 nt, Artificial Sequence
  Synthetic
auugcuuaccaaaggcuag

SEQ ID NO: 1411 - RNA, 19 nt, Artificial Sequence
  Synthetic
gugcgauguuucaggaggc

SEQ ID NO: 1412 - RNA, 19 nt, Artificial Sequence
  Synthetic
cuggaggaagggggguugc

SEQ ID NO: 1413 - RNA, 19 nt, Artificial Sequence
  Synthetic
caguggagagggacagccc

SEQ ID NO: 1414 - RNA, 19 nt, Artificial Sequence
  Synthetic
cacugagaagucaaacauu

SEQ ID NO: 1415 - RNA, 19 nt, Artificial Sequence
  Synthetic
uucaaaguuuggauugcau

SEQ ID NO: 1416 - RNA, 19 nt, Artificial Sequence
  Synthetic
ucaaguggcaugugcugug

SEQ ID NO: 1417 - RNA, 19 nt, Artificial Sequence
  Synthetic
gaccauuuauaauguuaga

SEQ ID NO: 1418 - RNA, 19 nt, Artificial Sequence
  Synthetic
aaauuuuacaauaggugcu

SEQ ID NO: 1419 - RNA, 19 nt, Artificial Sequence
  Synthetic
uuauucucaaagcaggaau

SEQ ID NO: 1420 - RNA, 19 nt, Artificial Sequence
  Synthetic
uugguggcagauuuuacaa

SEQ ID NO: 1421 - RNA, 19 nt, Artificial Sequence
  Synthetic
aaagauguauccuuccaau

SEQ ID NO: 1422 - RNA, 19 nt, Artificial Sequence
  Synthetic
uuuggaaucuucucuuuga

SEQ ID NO: 1423 - RNA, 19 nt, Artificial Sequence
  Synthetic
acaauuccuagauaaaaag

SEQ ID NO: 1424 - RNA, 19 nt, Artificial Sequence
  Synthetic
gauggccuuugucuuauga

SEQ ID NO: 1425 - RNA, 19 nt, Artificial Sequence
  Synthetic
aauauuuauaacagcauuc

SEQ ID NO: 1426 - RNA, 19 nt, Artificial Sequence
  Synthetic
cugucacaauaaauguauu

SEQ ID NO: 1427 - RNA, 19 nt, Artificial Sequence
  Synthetic
uaaauguauucaaauacca

SEQ ID NO: 1428 - RNA, 19 nt, Artificial Sequence
  Synthetic
agccacacucagugcaacu

SEQ ID NO: 1429 - RNA, 19 nt, Artificial Sequence
  Synthetic
cucccgccucgcugcuuca

SEQ ID NO: 1430 - RNA, 19 nt, Artificial Sequence
  Synthetic
ugacuccgcgcaccuccac

SEQ ID NO: 1431 - RNA, 19 nt, Artificial Sequence
  Synthetic
ugugucugucugucugccu

SEQ ID NO: 1432 - RNA, 19 nt, Artificial Sequence
  Synthetic
ccgaccuggcuggcuggcu

SEQ ID NO: 1433 - RNA, 19 nt, Artificial Sequence
  Synthetic
gcaguucggacuauacugc

SEQ ID NO: 1434 - RNA, 19 nt, Artificial Sequence
  Synthetic
gaaaagaaaauaagauuug

SEQ ID NO: 1435 - RNA, 19 nt, Artificial Sequence
  Synthetic
ggcaguuagagagaaggug

SEQ ID NO: 1436 - RNA, 19 nt, Artificial Sequence
  Synthetic
ccacaggcgcuagcucugg

SEQ ID NO: 1437 - RNA, 19 nt, Artificial Sequence
  Synthetic
gaaccaccagcccgggagc

SEQ ID NO: 1438 - RNA, 19 nt, Artificial Sequence
  Synthetic
ggcucucuggacacucccg

SEQ ID NO: 1439 - RNA, 19 nt, Artificial Sequence
  Synthetic
ggggccggcuggagacaag

SEQ ID NO: 1440 - RNA, 19 nt, Artificial Sequence
  Synthetic
cagcagggcucuccucccg

SEQ ID NO: 1441 - RNA, 19 nt, Artificial Sequence
  Synthetic
cugucaacagcgccugggc

SEQ ID NO: 1442 - RNA, 19 nt, Artificial Sequence
  Synthetic
uaccgcugcuuuccgccgc

SEQ ID NO: 1443 - RNA, 19 nt, Artificial Sequence
  Synthetic
cccggcgggcgcguggggu

SEQ ID NO: 1444 - RNA, 19 nt, Artificial Sequence
  Synthetic
agccgcucgccgacguccc

SEQ ID NO: 1445 - RNA, 19 nt, Artificial Sequence
  Synthetic
aaaguucuuugcugcugca

SEQ ID NO: 1446 - RNA, 19 nt, Artificial Sequence
  Synthetic
ccgguccuccccgccggga

SEQ ID NO: 1447 - RNA, 19 nt, Artificial Sequence
  Synthetic
ggacucugccacuugucuc

SEQ ID NO: 1448 - RNA, 19 nt, Artificial Sequence
  Synthetic
uugcaaaaguucgcuccgg

SEQ ID NO: 1449 - RNA, 19 nt, Artificial Sequence
  Synthetic
cuaagacgcaggaaaggcu

SEQ ID NO: 1450 - RNA, 19 nt, Artificial Sequence
  Synthetic
uuaccgccguggagaagcc

SEQ ID NO: 1451 - RNA, 19 nt, Artificial Sequence
  Synthetic
uccgccgccuucuggucuu

SEQ ID NO: 1452 - RNA, 19 nt, Artificial Sequence
  Synthetic
ucuucucuugcguggcucu

SEQ ID NO: 1453 - RNA, 19 nt, Artificial Sequence
  Synthetic
aagcugagcgcacguccuu

SEQ ID NO: 1454 - RNA, 19 nt, Artificial Sequence
  Synthetic
caacaaccggugcgagcga

SEQ ID NO: 1455 - RNA, 19 nt, Artificial Sequence
  Synthetic
cucgcgcucgcccaaguuc

SEQ ID NO: 1456 - RNA, 19 nt, Artificial Sequence
  Synthetic
ggcgcccggcagccgcggc

SEQ ID NO: 1457 - RNA, 19 nt, Artificial Sequence
  Synthetic
ccgcugcuagggggagggg

SEQ ID NO: 1458 - RNA, 19 nt, Artificial Sequence
  Synthetic
gacgacuuguccccuccuc

SEQ ID NO: 1459 - RNA, 19 nt, Artificial Sequence
  Synthetic
cuuggccgcccggacuccg

SEQ ID NO: 1460 - RNA, 19 nt, Artificial Sequence
  Synthetic
ggccggccggcggcggguc

SEQ ID NO: 1461 - RNA, 19 nt, Artificial Sequence
  Synthetic
cagugcggacccugcagug

SEQ ID NO: 1462 - RNA, 19 nt, Artificial Sequence
  Synthetic
ucuccccgcggagcggauc

SEQ ID NO: 1463 - RNA, 19 nt, Artificial Sequence
  Synthetic
acuucccagagcagcggcu

SEQ ID NO: 1464 - RNA, 19 nt, Artificial Sequence
  Synthetic
gaguccgcaggcgaacuca

SEQ ID NO: 1465 - RNA, 19 nt, Artificial Sequence
  Synthetic
gggcgcagcgguuccucgg

SEQ ID NO: 1466 - RNA, 19 nt, Artificial Sequence
  Synthetic
acucacugagcgcucuucg

SEQ ID NO: 1467 - RNA, 19 nt, Artificial Sequence
  Synthetic
cuuugaaaagucgcgguca

SEQ ID NO: 1468 - RNA, 19 nt, Artificial Sequence
  Synthetic
cucgcgcgcgcuacccggc

SEQ ID NO: 1469 - RNA, 19 nt, Artificial Sequence
  Synthetic
cgcacucuuacuugucgac

SEQ ID NO: 1470 - RNA, 19 nt, Artificial Sequence
  Synthetic
guuaauuaagaugccuccc

SEQ ID NO: 1471 - RNA, 19 nt, Artificial Sequence
  Synthetic
cgcuccagggagcgcaggg

SEQ ID NO: 1472 - RNA, 19 nt, Artificial Sequence
  Synthetic
gcgcccuccucaccagcuc

SEQ ID NO: 1473 - RNA, 19 nt, Artificial Sequence
  Synthetic
cuggcugucguccccgcug

SEQ ID NO: 1474 - RNA, 19 nt, Artificial Sequence
  Synthetic
uaagagcgcacgcacccgc

SEQ ID NO: 1475 - RNA, 19 nt, Artificial Sequence
  Synthetic
ugacagggaaaguuucucu

SEQ ID NO: 1476 - RNA, 19 nt, Artificial Sequence
  Synthetic
cgcgccccccggagccuuu

SEQ ID NO: 1477 - RNA, 19 nt, Artificial Sequence
  Synthetic
uggcaagcgggggacaccc

SEQ ID NO: 1478 - RNA, 19 nt, Artificial Sequence
  Synthetic
ggggccgcaacagggcucu

SEQ ID NO: 1479 - RNA, 19 nt, Artificial Sequence
  Synthetic
cgugcgcgcacaaguuucg

SEQ ID NO: 1480 - RNA, 19 nt, Artificial Sequence
  Synthetic
cacgugagguuaguuuggc

SEQ ID NO: 1481 - RNA, 19 nt, Artificial Sequence
  Synthetic
uagaacaguccgucacuuc

SEQ ID NO: 1482 - RNA, 19 nt, Artificial Sequence
  Synthetic
uuuccaucuuugcagucau

SEQ ID NO: 1483 - RNA, 19 nt, Artificial Sequence
  Synthetic
caucgucauagaaggucgu

SEQ ID NO: 1484 - RNA, 19 nt, Artificial Sequence
  Synthetic
ggaacgaggcguugagggc

SEQ ID NO: 1485 - RNA, 19 nt, Artificial Sequence
  Synthetic
guccgcucucggacgggag

SEQ ID NO: 1486 - RNA, 19 nt, Artificial Sequence
  Synthetic
gguuacuguagccauaagg

SEQ ID NO: 1487 - RNA, 19 nt, Artificial Sequence
  Synthetic
ucuguuucaggaucuuggg

SEQ ID NO: 1488 - RNA, 19 nt, Artificial Sequence
  Synthetic
ccagguucagggucaugcu

SEQ ID NO: 1489 - RNA, 19 nt, Artificial Sequence
  Synthetic
ggcuccccacugggucggc

SEQ ID NO: 1490 - RNA, 19 nt, Artificial Sequence
  Synthetic
cgcggaggugcggcuucag

SEQ ID NO: 1491 - RNA, 19 nt, Artificial Sequence
  Synthetic
ggagguccgaguucuuggc

SEQ ID NO: 1492 - RNA, 19 nt, Artificial Sequence
  Synthetic
ccacgucgggcgaggugag

SEQ ID NO: 1493 - RNA, 19 nt, Artificial Sequence
  Synthetic
acgccagcuugagcagccc

SEQ ID NO: 1494 - RNA, 19 nt, Artificial Sequence
  Synthetic
ggcgcuccagcucgggcga

SEQ ID NO: 1495 - RNA, 19 nt, Artificial Sequence
  Synthetic
ugcuggacuggauuaucag

SEQ ID NO: 1496 - RNA, 19 nt, Artificial Sequence
  Synthetic
ugguggugaugugcccguu

SEQ ID NO: 1497 - RNA, 19 nt, Artificial Sequence
  Synthetic
acugggugggggucggcgu

SEQ ID NO: 1498 - RNA, 19 nt, Artificial Sequence
  Synthetic
cguucuuggggcacaggaa

SEQ ID NO: 1499 - RNA, 19 nt, Artificial Sequence
  Synthetic
ccuccugcucaucugucac

SEQ ID NO: 1500 - RNA, 19 nt, Artificial Sequence
  Synthetic
cgaagcccucggcgaaccc

SEQ ID NO: 1501 - RNA, 19 nt, Artificial Sequence
  Synthetic
guucggccagggcgcgcac

SEQ ID NO: 1502 - RNA, 19 nt, Artificial Sequence
  Synthetic
gcguguucuggcugugcag

SEQ ID NO: 1503 - RNA, 19 nt, Artificial Sequence
  Synthetic
ccgacgugacgcugggcag

SEQ ID NO: 1504 - RNA, 19 nt, Artificial Sequence
  Synthetic
cguugaccggcugcgccgc

SEQ ID NO: 1505 - RNA, 19 nt, Artificial Sequence
  Synthetic
gagccaccaugccugcccc

SEQ ID NO: 1506 - RNA, 19 nt, Artificial Sequence
  Synthetic
ccaccgaggcuaccgcggg

SEQ ID NO: 1507 - RNA, 19 nt, Artificial Sequence
  Synthetic
cgcugccgcugcccccugc

SEQ ID NO: 1508 - RNA, 19 nt, Artificial Sequence
  Synthetic
ggcuggcgcugaagccgcc

SEQ ID NO: 1509 - RNA, 19 nt, Artificial Sequence
  Synthetic
ccggcggcucgcugugcag

SEQ ID NO: 1510 - RNA, 19 nt, Artificial Sequence
  Synthetic
ugcugagguuugcguagac

SEQ ID NO: 1511 - RNA, 19 nt, Artificial Sequence
  Synthetic
gcgcgccuggguugaaguu

SEQ ID NO: 1512 - RNA, 19 nt, Artificial Sequence
  Synthetic
ccccgccgccgcugcucag

SEQ ID NO: 1513 - RNA, 19 nt, Artificial Sequence
  Synthetic
ccgcgccguaggagggcgc

SEQ ID NO: 1514 - RNA, 19 nt, Artificial Sequence
  Synthetic
cgggaaaggccaggccggc

SEQ ID NO: 1515 - RNA, 19 nt, Artificial Sequence
  Synthetic
gcugcugcugggguugcgc

SEQ ID NO: 1516 - RNA, 19 nt, Artificial Sequence
  Synthetic
gguggugcggcggcugcug

SEQ ID NO: 1517 - RNA, 19 nt, Artificial Sequence
  Synthetic
cgggcaucugcuggggcag

SEQ ID NO: 1518 - RNA, 19 nt, Artificial Sequence
  Synthetic
gcagccgcgggugcugcac

SEQ ID NO: 1519 - RNA, 19 nt, Artificial Sequence
  Synthetic
gcuccuccuucagggccug

SEQ ID NO: 1520 - RNA, 19 nt, Artificial Sequence
  Synthetic
ucucgggcacugucugagg

SEQ ID NO: 1521 - RNA, 19 nt, Artificial Sequence
  Synthetic
gcggugucucgccgggcau

SEQ ID NO: 1522 - RNA, 19 nt, Artificial Sequence
  Synthetic
ugucgaugggggacagggg

SEQ ID NO: 1523 - RNA, 19 nt, Artificial Sequence
  Synthetic
uccgcuccugggacuccau

SEQ ID NO: 1524 - RNA, 19 nt, Artificial Sequence
  Synthetic
gcuuccucuccgccuugau

SEQ ID NO: 1525 - RNA, 19 nt, Artificial Sequence
  Synthetic
cgaugcgguuccucaugcg

SEQ ID NO: 1526 - RNA, 19 nt, Artificial Sequence
  Synthetic
uucggcacuuggaggcagc

SEQ ID NO: 1527 - RNA, 19 nt, Artificial Sequence
  Synthetic
uucucuccagcuuccuuuu

SEQ ID NO: 1528 - RNA, 19 nt, Artificial Sequence
  Synthetic
uuuccuccagccgggcgau

SEQ ID NO: 1529 - RNA, 19 nt, Artificial Sequence
  Synthetic
cuuucaagguuuucacuuu

SEQ ID NO: 1530 - RNA, 19 nt, Artificial Sequence
  Synthetic
ccagcuccgaguucugagc

SEQ ID NO: 1531 - RNA, 19 nt, Artificial Sequence
  Synthetic
gcauguuggccguggacgc

SEQ ID NO: 1532 - RNA, 19 nt, Artificial Sequence
  Synthetic
gugccaccuguucccugag

SEQ ID NO: 1533 - RNA, 19 nt, Artificial Sequence
  Synthetic
ugacuuucuguuuaagcug

SEQ ID NO: 1534 - RNA, 19 nt, Artificial Sequence
  Synthetic
cacuguuaacgugguucau

SEQ ID NO: 1535 - RNA, 19 nt, Artificial Sequence
  Synthetic
uuagcaugaguuggcaccc

SEQ ID NO: 1536 - RNA, 19 nt, Artificial Sequence
  Synthetic
auguuugcaacugcugcgu

SEQ ID NO: 1537 - RNA, 19 nt, Artificial Sequence
  Synthetic
cgacggucucucuucaaaa

SEQ ID NO: 1538 - RNA, 19 nt, Artificial Sequence
  Synthetic
ucguugccccucagccccc

SEQ ID NO: 1539 - RNA, 19 nt, Artificial Sequence
  Synthetic
cuguguuauuuuuuuucuu

SEQ ID NO: 1540 - RNA, 19 nt, Artificial Sequence
  Synthetic
guucucaagucugucucuc

SEQ ID NO: 1541 - RNA, 19 nt, Artificial Sequence
  Synthetic
uccgucgcaacuugucaag

SEQ ID NO: 1542 - RNA, 19 nt, Artificial Sequence
  Synthetic
ggacacuucuuuuuucucu

SEQ ID NO: 1543 - RNA, 19 nt, Artificial Sequence
  Synthetic
cccuuggcuuuaguucucg

SEQ ID NO: 1544 - RNA, 19 nt, Artificial Sequence
  Synthetic
cccaguccaacuuggauac

SEQ ID NO: 1545 - RNA, 19 nt, Artificial Sequence
  Synthetic
gggcgccgucagaccgaac

SEQ ID NO: 1546 - RNA, 19 nt, Artificial Sequence
  Synthetic
cccacucgugcacacuggg

SEQ ID NO: 1547 - RNA, 19 nt, Artificial Sequence
  Synthetic
gggcgcgaccaaguccuuc

SEQ ID NO: 1548 - RNA, 19 nt, Artificial Sequence
  Synthetic
uggcuccacgccaagggag

SEQ ID NO: 1549 - RNA, 19 nt, Artificial Sequence
  Synthetic
ccgcaggcggccgcucccu

SEQ ID NO: 1550 - RNA, 19 nt, Artificial Sequence
  Synthetic
uccgcaaagcggggcagcc

SEQ ID NO: 1551 - RNA, 19 nt, Artificial Sequence
  Synthetic
ucgcgcggggacagcccgu

SEQ ID NO: 1552 - RNA, 19 nt, Artificial Sequence
  Synthetic
gaaaguccaacguuccguu

SEQ ID NO: 1553 - RNA, 19 nt, Artificial Sequence
  Synthetic
uucuuggucaauguuaacg

SEQ ID NO: 1554 - RNA, 19 nt, Artificial Sequence
  Synthetic
aauguuagguccaugcagu

SEQ ID NO: 1555 - RNA, 19 nt, Artificial Sequence
  Synthetic
uaauacugaaugagaucga

SEQ ID NO: 1556 - RNA, 19 nt, Artificial Sequence
  Synthetic
cccucccccuccccccuuu

SEQ ID NO: 1557 - RNA, 19 nt, Artificial Sequence
  Synthetic
cuauugcaguuuguaaccc

SEQ ID NO: 1558 - RNA, 19 nt, Artificial Sequence
  Synthetic
agaagcaaucuacagucuc

SEQ ID NO: 1559 - RNA, 19 nt, Artificial Sequence
  Synthetic
guucuuaaggaguacuaca

SEQ ID NO: 1560 - RNA, 19 nt, Artificial Sequence
  Synthetic
acccuccccccgcuuugug

SEQ ID NO: 1561 - RNA, 19 nt, Artificial Sequence
  Synthetic
uccugccgccccuccccaa

SEQ ID NO: 1562 - RNA, 19 nt, Artificial Sequence
  Synthetic
cgcucucacaaaccucccu

SEQ ID NO: 1563 - RNA, 19 nt, Artificial Sequence
  Synthetic
caucuguaggcucagccuc

SEQ ID NO: 1564 - RNA, 19 nt, Artificial Sequence
  Synthetic
agcaggccagaaagaguuc

SEQ ID NO: 1565 - RNA, 19 nt, Artificial Sequence
  Synthetic
acauacacaguuaacgaaa

SEQ ID NO: 1566 - RNA, 19 nt, Artificial Sequence
  Synthetic
uaaaaaauauauauaugua

SEQ ID NO: 1567 - RNA, 19 nt, Artificial Sequence
  Synthetic
aaucagcuuuaaucaaauu

SEQ ID NO: 1568 - RNA, 19 nt, Artificial Sequence
  Synthetic
aagcuguuuauugacagua

SEQ ID NO: 1569 - RNA, 19 nt, Artificial Sequence
  Synthetic
auaacuuacaaaggcauga

SEQ ID NO: 1570 - RNA, 19 nt, Artificial Sequence
  Synthetic
caaacaaacaaacaagaaa

SEQ ID NO: 1571 - RNA, 19 nt, Artificial Sequence
  Synthetic
aacacugggcaggauaccc

SEQ ID NO: 1572 - RNA, 19 nt, Artificial Sequence
  Synthetic
aaucucuuauuuacaaaca

SEQ ID NO: 1573 - RNA, 19 nt, Artificial Sequence
  Synthetic
uaaacucagagugcuccaa

SEQ ID NO: 1574 - RNA, 19 nt, Artificial Sequence
  Synthetic
auacuuuauuacaaauggu

SEQ ID NO: 1575 - RNA, 19 nt, Artificial Sequence
  Synthetic
aaaacauaaaaaaauuaua

SEQ ID NO: 1576 - RNA, 19 nt, Artificial Sequence
  Synthetic
ucuggaauuuucagaaaca

SEQ ID NO: 1577 - RNA, 19 nt, Artificial Sequence
  Synthetic
auuuucuuaaauauccuuu

SEQ ID NO: 1578 - RNA, 19 nt, Artificial Sequence
  Synthetic
uuuccaauaguuuauugua

SEQ ID NO: 1579 - RNA, 19 nt, Artificial Sequence
  Synthetic
aagagguuaggggaguacu

SEQ ID NO: 1580 - RNA, 19 nt, Artificial Sequence
  Synthetic
ucuacagaugaugcagaaa

SEQ ID NO: 1581 - RNA, 19 nt, Artificial Sequence
  Synthetic
caccuagauagacuaggau

SEQ ID NO: 1582 - RNA, 19 nt, Artificial Sequence
  Synthetic
ucuuaacucuuucaacucc

SEQ ID NO: 1583 - RNA, 19 nt, Artificial Sequence
  Synthetic
agugauuuuaucgagcauu

SEQ ID NO: 1584 - RNA, 19 nt, Artificial Sequence
  Synthetic
auaguaagaagcacugaga

SEQ ID NO: 1585 - RNA, 19 nt, Artificial Sequence
  Synthetic
aacaguuuuuacugcuuaa

SEQ ID NO: 1586 - RNA, 19 nt, Artificial Sequence
  Synthetic
uuucuaagucuaauagaga

SEQ ID NO: 1587 - RNA, 19 nt, Artificial Sequence
  Synthetic
guacaucagguacauuuau

SEQ ID NO: 1588 - RNA, 19 nt, Artificial Sequence
  Synthetic
agccugacauagcaucagg

SEQ ID NO: 1589 - RNA, 19 nt, Artificial Sequence
  Synthetic
ggggagcguggaguaugaa

SEQ ID NO: 1590 - RNA, 19 nt, Artificial Sequence
  Synthetic
uuccauauagauacgcugg

SEQ ID NO: 1591 - RNA, 19 nt, Artificial Sequence
  Synthetic
cuagccuuugguaagcaau

SEQ ID NO: 1592 - RNA, 19 nt, Artificial Sequence
  Synthetic
gccuccugaaacaucgcac

SEQ ID NO: 1593 - RNA, 19 nt, Artificial Sequence
  Synthetic
gcaaccccccuuccuccag

SEQ ID NO: 1594 - RNA, 19 nt, Artificial Sequence
  Synthetic
gggcugucccucuccacug

SEQ ID NO: 1595 - RNA, 19 nt, Artificial Sequence
  Synthetic
aauguuugacuucucagug

SEQ ID NO: 1596 - RNA, 19 nt, Artificial Sequence
  Synthetic
augcaauccaaacuuugaa

SEQ ID NO: 1597 - RNA, 19 nt, Artificial Sequence
  Synthetic
cacagcacaugccacuuga

SEQ ID NO: 1598 - RNA, 19 nt, Artificial Sequence
  Synthetic
ucuaacauuauaaaugguc

SEQ ID NO: 1599 - RNA, 19 nt, Artificial Sequence
  Synthetic
agcaccuauuguaaaauuu

SEQ ID NO: 1600 - RNA, 19 nt, Artificial Sequence
  Synthetic
auuccugcuuugagaauaa

SEQ ID NO: 1601 - RNA, 19 nt, Artificial Sequence
  Synthetic
uuguaaaaucugccaccaa

SEQ ID NO: 1602 - RNA, 19 nt, Artificial Sequence
  Synthetic
auuggaaggauacaucuuu

SEQ ID NO: 1603 - RNA, 19 nt, Artificial Sequence
  Synthetic
ucaaagagaagauuccaaa

SEQ ID NO: 1604 - RNA, 19 nt, Artificial Sequence
  Synthetic
cuuuuuaucuaggaauugu

SEQ ID NO: 1605 - RNA, 19 nt, Artificial Sequence
  Synthetic
ucauaagacaaaggccauc

SEQ ID NO: 1606 - RNA, 19 nt, Artificial Sequence
  Synthetic
gaaugcuguuauaaauauu

SEQ ID NO: 1607 - RNA, 19 nt, Artificial Sequence
  Synthetic
aauacauuuauugugacag

SEQ ID NO: 1608 - RNA, 19 nt, Artificial Sequence
  Synthetic
ugguauuugaauacauuua

SEQ ID NO: 1609 - RNA, 23 nt, Artificial Sequence
  Synthetic
ggaaaaagugaaaaccuugaaag

SEQ ID NO: 1610 - RNA, 23 nt, Artificial Sequence
  Synthetic
caacucaugcuaacgcagcaguu

SEQ ID NO: 1611 - RNA, 23 nt, Artificial Sequence
  Synthetic
cauugaccaagaacugcauggac

SEQ ID NO: 1612 - RNA, 23 nt, Artificial Sequence
  Synthetic
accaagaacugcauggaccuaac

SEQ ID NO: 1613 - RNA, 23 nt, Artificial Sequence
  Synthetic
gaacugcauggaccuaacauucg

SEQ ID NO: 1614 - RNA, 23 nt, Artificial Sequence
  Synthetic
aacugcauggaccuaacauucga

SEQ ID NO: 1615 - RNA, 23 nt, Artificial Sequence
  Synthetic
cugcauggaccuaacauucgauc

SEQ ID NO: 1616 - RNA, 23 nt, Artificial Sequence
  Synthetic
gcauggaccuaacauucgaucuc

SEQ ID NO: 1617 - DNA, 21 bp, Artificial Sequence
  Synthetic
  misc_feature (1)..(19): ribonucleotide unmodified or modified as described for this sequence
aaaaagugaaaaccuugaatt

SEQ ID NO: 1618 - DNA, 21 bp, Artificial Sequence
  Synthetic
  misc_feature (1)..(19): ribonucleotide unmodified or modified as described for this sequence
acucaugcuaacgcagcagtt

SEQ ID NO: 1619 - DNA, 21 bp, Artificial Sequence
  Synthetic
  misc_feature (1)..(19): ribonucleotide unmodified or modified as described for this sequence
uugaccaagaacugcauggtt

SEQ ID NO: 1620 - DNA, 21 bp, Artificial Sequence
  Synthetic
  misc_feature (1)..(19): ribonucleotide unmodified or modified as described for this sequence
caagaacugcauggaccuatt

SEQ ID NO: 1621 - DNA, 21 bp, Artificial Sequence
  Synthetic
  misc_feature (1)..(19): ribonucleotide unmodified or modified as described for this sequence
acugcauggaccuaacauutt

SEQ ID NO: 1622 - DNA, 21 bp, Artificial Sequence
  Synthetic
  misc_feature (1)..(19): ribonucleotide unmodified or modified as described for this sequence
cugcauggaccuaacauuctt

SEQ ID NO: 1623 - DNA, 21 bp, Artificial Sequence
  Synthetic
  misc_feature (1)..(19): ribonucleotide unmodified or modified as described for this sequence
gcauggaccuaacauucgatt

SEQ ID NO: 1624 - DNA, 21 bp, Artificial Sequence
  Synthetic
  misc_feature (1)..(19): ribonucleotide unmodified or modified as described for this sequence
auggaccuaacauucgauctt

SEQ ID NO: 1625 - DNA, 21 bp, Artificial Sequence
  Synthetic
  misc_feature (1)..(19): ribonucleotide unmodified or modified as described for this sequence
uucaagguuuucacuuuuutt

SEQ ID NO: 1626 - DNA, 21 bp, Artificial Sequence
  Synthetic
  misc_feature (1)..(19): ribonucleotide unmodified or modified as described for this sequence
cugcugcguuagcaugagutt

SEQ ID NO: 1627 - DNA, 21 bp, Artificial Sequence
  Synthetic
  misc_feature (1)..(19): ribonucleotide unmodified or modified as described for this sequence
ccaugcaguucuuggucaatt

SEQ ID NO: 1628 - DNA, 21 bp, Artificial Sequence
  Synthetic
  misc_feature (1)..(19): ribonucleotide unmodified or modified as described for this sequence
uagguccaugcaguucuugtt

SEQ ID NO: 1629 - DNA, 21 bp, Artificial Sequence
  Synthetic
  misc_feature (1)..(19): ribonucleotide unmodified or modified as described for this sequence
aauguuagguccaugcagutt

SEQ ID NO: 1630 - DNA, 21 bp, Artificial Sequence
  Synthetic
  misc_feature (1)..(19): ribonucleotide unmodified or modified as described for this sequence
gaauguuagguccaugcagtt

SEQ ID NO: 1631 - DNA, 21 bp, Artificial Sequence
  Synthetic
  misc_feature (1)..(19): ribonucleotide unmodified or modified as described for this sequence
ucgaauguuagguccaugctt

SEQ ID NO: 1632 - DNA, 21 bp, Artificial Sequence
  Synthetic
  misc_feature (1)..(19): ribonucleotide unmodified or modified as described for this sequence
gaucgaauguuagguccautt

SEQ ID NO: 1633 - DNA, 21 bp, Artificial Sequence
  Synthetic
  misc_feature (1)..(1): 5'-3 attached terminal deoxyabasic moiety
  misc_feature (7)..(7): 2'-deoxy-2'-fluoro
  misc_feature (13)..(16): 2'-deoxy-2'-fluoro
  misc_feature (1)..(19): ribonucleotide unmodified or modified as described for this sequence
  misc_feature (21)..(21): 3'-3 attached terminal deoxyabasic moiety
aaaaagugaaaaccuugaatt

SEQ ID NO: 1634 - DNA, 21 bp, Artificial Sequence
  Synthetic
  misc_feature (1)..(1): 5'-3 attached terminal deoxyabasic moiety
  misc_feature (2)..(4): 2'-deoxy-2'-fluoro
  misc_feature (6)..(6): 2'-deoxy-2'-fluoro
  misc_feature (8)..(9): 2'-deoxy-2'-fluoro
  misc_feature (12)..(12): 2'-deoxy-2'-fluoro
  misc_feature (14)..(14): 2'-deoxy-2'-fluoro
  misc_feature (17)..(17): 2'-deoxy-2'-fluoro
  misc_feature (1)..(19): ribonucleotide unmodified or modified as described for this sequence
  misc_feature (21)..(21): 3'-3 attached terminal deoxyabasic moiety
acucaugcuaacgcagcagtt

SEQ ID NO: 1635 - DNA, 21 bp, Artificial Sequence
  Synthetic
  misc_feature (1)..(2): 2'-deoxy-2'-fluoro
  misc_feature (1)..(1): 5'-3 attached terminal deoxyabasic moiety
  misc_feature (5)..(6): 2'-deoxy-2'-fluoro
  misc_feature (12)..(13): 2'-deoxy-2'-fluoro
  misc_feature (15)..(15): 2'-deoxy-2'-fluoro
  misc_feature (17)..(17): 2'-deoxy-2'-fluoro
  misc_feature (1)..(19): ribonucleotide unmodified or modified as described for this sequence
  misc_feature (21)..(21): 3'-3 attached terminal deoxyabasic moiety
uugaccaagaacugcauggtt

SEQ ID NO: 1636 - DNA, 21 bp, Artificial Sequence
  Synthetic
  misc_feature (1)..(1): 2'-deoxy-2'-fluoro
  misc_feature (1)..(1): 5'-3 attached terminal deoxyabasic moiety
  misc_feature (7)..(8): 2'-deoxy-2'-fluoro
  misc_feature (10)..(10): 2'-deoxy-2'-fluoro
  misc_feature (12)..(12): 2'-deoxy-2'-fluoro
  misc_feature (16)..(18): 2'-deoxy-2'-fluoro
  misc_feature (1)..(19): ribonucleotide unmodified or modified as described for this sequence
  misc_feature (21)..(21): 3'-3 attached terminal deoxyabasic moiety
caagaacugcauggaccuatt

SEQ ID NO: 1637 - DNA, 21 bp, Artificial Sequence
  Synthetic
  misc_feature (1)..(1): 5'-3 attached terminal deoxyabasic moiety
  misc_feature (2)..(3): 2'-deoxy-2'-fluoro
  misc_feature (5)..(5): 2'-deoxy-2'-fluoro
  misc_feature (7)..(7): 2'-deoxy-2'-fluoro
  misc_feature (11)..(13): 2'-deoxy-2'-fluoro
  misc_feature (16)..(16): 2'-deoxy-2'-fluoro
  misc_feature (18)..(19): 2'-deoxy-2'-fluoro
  misc_feature (1)..(19): ribonucleotide unmodified or modified as described for this sequence
  misc_feature (21)..(21): 3'-3 attached terminal deoxyabasic moiety
acugcauggaccuaacauutt

SEQ ID NO: 1638 - DNA, 21 bp, Artificial Sequence
  Synthetic
  misc_feature (1)..(2): 2'-deoxy-2'-fluoro
  misc_feature (1)..(1): 5'-3 attached terminal deoxyabasic moiety
  misc_feature (4)..(4): 2'-deoxy-2'-fluoro
  misc_feature (6)..(6): 2'-deoxy-2'-fluoro
  misc_feature (10)..(12): 2'-deoxy-2'-fluoro
  misc_feature (15)..(15): 2'-deoxy-2'-fluoro
  misc_feature (17)..(19): 2'-deoxy-2'-fluoro
  misc_feature (1)..(19): ribonucleotide unmodified or modified as described for this sequence
  misc_feature (21)..(21): 3'-3 attached terminal deoxyabasic moiety
cugcauggaccuaacauuctt

SEQ ID NO: 1639 - DNA, 21 bp, Artificial Sequence
  Synthetic
  misc_feature (1)..(1): 5'-3 attached terminal deoxyabasic moiety
  misc_feature (2)..(2): 2'-deoxy-2'-fluoro
  misc_feature (4)..(4): 2'-deoxy-2'-fluoro
  misc_feature (8)..(10): 2'-deoxy-2'-fluoro
  misc_feature (13)..(13): 2'-deoxy-2'-fluoro
  misc_feature (15)..(17): 2'-deoxy-2'-fluoro
  misc_feature (1)..(19): ribonucleotide unmodified or modified as described for this sequence
  misc_feature (21)..(21): 3'-3 attached terminal deoxyabasic moiety
gcauggaccuaacauucgatt

SEQ ID NO: 1640 - DNA, 21 bp, Artificial Sequence
  Synthetic
  misc_feature (1)..(1): 5'-3 attached terminal deoxyabasic moiety
  misc_feature (2)..(2): 2'-deoxy-2'-fluoro
  misc_feature (6)..(8): 2'-deoxy-2'-fluoro
  misc_feature (11)..(11): 2'-deoxy-2'-fluoro
  misc_feature (13)..(15): 2'-deoxy-2'-fluoro
  misc_feature (18)..(19): 2'-deoxy-2'-fluoro
  misc_feature (1)..(19): ribonucleotide unmodified or modified as described for this sequence
  misc_feature (21)..(21): 3'-3 attached terminal deoxyabasic moiety
auggaccuaacauucgauctt

SEQ ID NO: 1641 - DNA, 21 bp, Artificial Sequence
  Synthetic
  misc_feature (1)..(3): 2'-deoxy-2'-fluoro
  misc_feature (8)..(12): 2'-deoxy-2'-fluoro
  misc_feature (14)..(19): 2'-deoxy-2'-fluoro
  misc_feature (1)..(19): ribonucleotide unmodified or modified as described for this sequence
  misc_feature (20)..(20): Phosphorothioate 3'-Internucleotide Linkage
uucaagguuuucacuuuuutt

SEQ ID NO: 1642 - DNA, 21 bp, Artificial Sequence
  Synthetic
  misc_feature (1)..(2): 2'-deoxy-2'-fluoro
  misc_feature (4)..(5): 2'-deoxy-2'-fluoro
  misc_feature (7)..(7): 2'-deoxy-2'-fluoro
  misc_feature (9)..(10): 2'-deoxy-2'-fluoro
  misc_feature (13)..(13): 2'-deoxy-2'-fluoro
  misc_feature (15)..(15): 2'-deoxy-2'-fluoro
  misc_feature (19)..(19): 2'-deoxy-2'-fluoro
  misc_feature (1)..(19): ribonucleotide unmodified or modified as described for this sequence
  misc_feature (20)..(20): Phosphorothioate 3'-Internucleotide Linkage
cugcugcguuagcaugagutt

SEQ ID NO: 1643 - DNA, 21 bp, Artificial Sequence
  Synthetic
  misc_feature (1)..(2): 2'-deoxy-2'-fluoro
  misc_feature (4)..(4): 2'-deoxy-2'-fluoro
  misc_feature (6)..(6): 2'-deoxy-2'-fluoro
  misc_feature (9)..(13): 2'-deoxy-2'-fluoro
  misc_feature (16)..(17): 2'-deoxy-2'-fluoro
  misc_feature (1)..(19): ribonucleotide unmodified or modified as described for this sequence
  misc_feature (20)..(20): Phosphorothioate 3'-Internucleotide Linkage
ccaugcaguucuuggucaatt

SEQ ID NO: 1644 - DNA, 21 bp, Artificial Sequence
  Synthetic
  misc_feature (1)..(1): 2'-deoxy-2'-fluoro
  misc_feature (5)..(7): 2'-deoxy-2'-fluoro
  misc_feature (9)..(9): 2'-deoxy-2'-fluoro
  misc_feature (11)..(11): 2'-deoxy-2'-fluoro
  misc_feature (14)..(18): 2'-deoxy-2'-fluoro
  misc_feature (1)..(19): ribonucleotide unmodified or modified as described for this sequence
  misc_feature (20)..(20): Phosphorothioate 3'-Internucleotide Linkage
uagguccaugcaguucuugtt

SEQ ID NO: 1645 - DNA, 21 bp, Artificial Sequence
  Synthetic
  misc_feature (3)..(3): 2'-deoxy-2'-fluoro
  misc_feature (5)..(6): 2'-deoxy-2'-fluoro
  misc_feature (10)..(12): 2'-deoxy-2'-fluoro
  misc_feature (14)..(14): 2'-deoxy-2'-fluoro
  misc_feature (16)..(16): 2'-deoxy-2'-fluoro
  misc_feature (19)..(19): 2'-deoxy-2'-fluoro
  misc_feature (1)..(19): ribonucleotide unmodified or modified as described for this sequence
  misc_feature (20)..(20): Phosphorothioate 3'-Internucleotide Linkage
aauguuagguccaugcagutt

SEQ ID NO: 1646 - DNA, 21 bp, Artificial Sequence
  Synthetic
  misc_feature (4)..(4): 2'-deoxy-2'-fluoro
  misc_feature (6)..(7): 2'-deoxy-2'-fluoro
  misc_feature (11)..(13): 2'-deoxy-2'-fluoro
  misc_feature (15)..(15): 2'-deoxy-2'-fluoro
  misc_feature (17)..(17): 2'-deoxy-2'-fluoro
  misc_feature (1)..(19): ribonucleotide unmodified or modified as described for this sequence
  misc_feature (20)..(20): Phosphorothioate 3'-Internucleotide Linkage
gaauguuagguccaugcagtt

SEQ ID NO: 1647 - DNA, 21 bp, Artificial Sequence
  Synthetic
  misc_feature (1)..(2): 2'-deoxy-2'-fluoro
  misc_feature (6)..(6): 2'-deoxy-2'-fluoro
  misc_feature (8)..(9): 2'-deoxy-2'-fluoro
  misc_feature (13)..(15): 2'-deoxy-2'-fluoro
  misc_feature (17)..(17): 2'-deoxy-2'-fluoro
  misc_feature (19)..(19): 2'-deoxy-2'-fluoro
  misc_feature (1)..(19): ribonucleotide unmodified or modified as described for this sequence
  misc_feature (20)..(20): Phosphorothioate 3'-Internucleotide Linkage
ucgaauguuagguccaugctt

SEQ ID NO: 1648 - DNA, 21 bp, Artificial Sequence
  Synthetic
  misc_feature (3)..(4): 2'-deoxy-2'-fluoro
  misc_feature (8)..(8): 2'-deoxy-2'-fluoro
  misc_feature (10)..(11): 2'-deoxy-2'-fluoro
  misc_feature (15)..(17): 2'-deoxy-2'-fluoro
  misc_feature (19)..(19): 2'-deoxy-2'-fluoro
  misc_feature (1)..(19): ribonucleotide unmodified or modified as described for this sequence
  misc_feature (20)..(20): Phosphorothioate 3'-Internucleotide Linkage
gaucgaauguuagguccautt

SEQ ID NO: 1649 - DNA, 21 bp, Artificial Sequence
  Synthetic
  misc_feature (1)..(6): 2'-deoxy
  misc_feature (1)..(1): 5'-3 attached terminal deoxyabasic moiety
  misc_feature (7)..(7): 2'-deoxy-2'-fluoro
  misc_feature (8)..(12): 2'-deoxy
  misc_feature (13)..(16): 2'-deoxy-2'-fluoro
  misc_feature (17)..(19): 2'-deoxy
  misc_feature (1)..(19): ribonucleotide unmodified or modified as described for this sequence
  misc_feature (21)..(21): 3'-3 attached terminal deoxyabasic moiety
aaaaagugaaaaccuugaatt

SEQ ID NO: 1650 - DNA, 21 bp, Artificial Sequence
  Synthetic
  misc_feature (1)..(1): 2'-deoxy
  misc_feature (1)..(1): 5'-3 attached terminal deoxyabasic moiety
  misc_feature (2)..(4): 2'-deoxy-2'-fluoro
  misc_feature (5)..(5): 2'-deoxy
  misc_feature (6)..(6): 2'-deoxy-2'-fluoro
  misc_feature (7)..(7): 2'-deoxy
  misc_feature (8)..(9): 2'-deoxy-2'-fluoro
  misc_feature (10)..(11): 2'-deoxy
  misc_feature (12)..(12): 2'-deoxy-2'-fluoro
  misc_feature (13)..(13): 2'-deoxy
  misc_feature (14)..(14): 2'-deoxy-2'-fluoro
  misc_feature (15)..(16): 2'-deoxy
  misc_feature (17)..(17): 2'-deoxy-2'-fluoro
  misc_feature (18)..(19): 2'-deoxy
  misc_feature (1)..(19): ribonucleotide unmodified or modified as described for this sequence
  misc_feature (21)..(21): 3'-3 attached terminal deoxyabasic moiety
acucaugcuaacgcagcagtt

SEQ ID NO: 1651 - DNA, 21 bp, Artificial Sequence
  Synthetic
  misc_feature (1)..(2): 2'-deoxy-2'-fluoro
  misc_feature (1)..(1): 5'-3 attached terminal deoxyabasic moiety
  misc_feature (3)..(4): 2'-deoxy
  misc_feature (5)..(6): 2'-deoxy-2'-fluoro
  misc_feature (7)..(11): 2'-deoxy
  misc_feature (12)..(13): 2'-deoxy-2'-fluoro
  misc_feature (14)..(14): 2'-deoxy
  misc_feature (15)..(15): 2'-deoxy-2'-fluoro
  misc_feature (16)..(16): 2'-deoxy
  misc_feature (17)..(17): 2'-deoxy-2'-fluoro
  misc_feature (18)..(19): 2'-deoxy
  misc_feature (1)..(19): ribonucleotide unmodified or modified as described for this sequence
  misc_feature (21)..(21): 3'-3 attached terminal deoxyabasic moiety
uugaccaagaacugcauggtt

SEQ ID NO: 1652 - DNA, 21 bp, Artificial Sequence
  Synthetic
  misc_feature (1)..(1): 2'-deoxy-2'-fluoro
  misc_feature (1)..(1): 5'-3 attached terminal deoxyabasic moiety
  misc_feature (2)..(6): 2'-deoxy
  misc_feature (7)..(8): 2'-deoxy-2'-fluoro
  misc_feature (9)..(9): 2'-deoxy
  misc_feature (10)..(10): 2'-deoxy-2'-fluoro
  misc_feature (11)..(11): 2'-deoxy
  misc_feature (12)..(12): 2'-deoxy-2'-fluoro
  misc_feature (13)..(15): 2'-deoxy
  misc_feature (16)..(18): 2'-deoxy-2'-fluoro
  misc_feature (19)..(19): 2'-deoxy
  misc_feature (1)..(19): ribonucleotide unmodified or modified as described for this sequence
  misc_feature (21)..(21): 3'-3 attached terminal deoxyabasic moiety
caagaacugcauggaccuatt

SEQ ID NO: 1653 - DNA, 21 bp, Artificial Sequence
  Synthetic
  misc_feature (1)..(1): 2'-deoxy
  misc_feature (1)..(1): 5'-3 attached terminal deoxyabasic moiety
  misc_feature (2)..(3): 2'-deoxy-2'-fluoro
  misc_feature (4)..(4): 2'-deoxy
  misc_feature (5)..(5): 2'-deoxy-2'-fluoro
  misc_feature (6)..(6): 2'-deoxy
  misc_feature (7)..(7): 2'-deoxy-2'-fluoro
  misc_feature (8)..(10): 2'-deoxy
  misc_feature (11)..(13): 2'-deoxy-2'-fluoro
  misc_feature (14)..(15): 2'-deoxy
  misc_feature (16)..(16): 2'-deoxy-2'-fluoro
  misc_feature (17)..(17): 2'-deoxy
  misc_feature (18)..(19): 2'-deoxy-2'-fluoro
  misc_feature (1)..(19): ribonucleotide unmodified or modified as described for this sequence
  misc_feature (21)..(21): 3'-3 attached terminal deoxyabasic moiety
acugcauggaccuaacauutt

SEQ ID NO: 1654 - DNA, 21 bp, Artificial Sequence
  Synthetic
  misc_feature (1)..(2): 2'-deoxy-2'-fluoro
  misc_feature (1)..(1): 5'-3 attached terminal deoxyabasic moiety
  misc_feature (3)..(3): 2'-deoxy
  misc_feature (4)..(4): 2'-deoxy-2'-fluoro
  misc_feature (5)..(5): 2'-deoxy
  misc_feature (6)..(6): 2'-deoxy-2'-fluoro
  misc_feature (7)..(9): 2'-deoxy
  misc_feature (10)..(12): 2'-deoxy-2'-fluoro
  misc_feature (13)..(14): 2'-deoxy
  misc_feature (15)..(15): 2'-deoxy-2'-fluoro
  misc_feature (16)..(16): 2'-deoxy
  misc_feature (17)..(19): 2'-deoxy-2'-fluoro
  misc_feature (1)..(19): ribonucleotide unmodified or modified as described for this sequence
  misc_feature (21)..(21): 3'-3 attached terminal deoxyabasic moiety
cugcauggaccuaacauuctt

SEQ ID NO: 1655 - DNA, 21 bp, Artificial Sequence
  Synthetic
  misc_feature (1)..(1): 2'-deoxy
  misc_feature (1)..(1): 5'-3 attached terminal deoxyabasic moiety
  misc_feature (2)..(2): 2'-deoxy-2'-fluoro
  misc_feature (3)..(3): 2'-deoxy
  misc_feature (4)..(4): 2'-deoxy-2'-fluoro
  misc_feature (5)..(7): 2'-deoxy
  misc_feature (8)..(10): 2'-deoxy-2'-fluoro
  misc_feature (11)..(12): 2'-deoxy
  misc_feature (13)..(13): 2'-deoxy-2'-fluoro
  misc_feature (14)..(14): 2'-deoxy
  misc_feature (15)..(17): 2'-deoxy-2'-fluoro
  misc_feature (18)..(19): 2'-deoxy
  misc_feature (1)..(19): ribonucleotide unmodified or modified as described for this sequence
  misc_feature (21)..(21): 3'-3 attached terminal deoxyabasic moiety
gcauggaccuaacauucgatt

SEQ ID NO: 1656 - DNA, 21 bp, Artificial Sequence
  Synthetic
  misc_feature (1)..(1): 2'-deoxy
  misc_feature (1)..(1): 5'-3 attached terminal deoxyabasic moiety
  misc_feature (2)..(2): 2'-deoxy-2'-fluoro
  misc_feature (3)..(5): 2'-deoxy
  misc_feature (6)..(8): 2'-deoxy-2'-fluoro
  misc_feature (9)..(10): 2'-deoxy
  misc_feature (11)..(11): 2'-deoxy-2'-fluoro
  misc_feature (12)..(12): 2'-deoxy
  misc_feature (13)..(15): 2'-deoxy-2'-fluoro
  misc_feature (16)..(17): 2'-deoxy
  misc_feature (18)..(19): 2'-deoxy-2'-fluoro
  misc_feature (1)..(19): ribonucleotide unmodified or modified as described for this sequence
  misc_feature (21)..(21): 3'-3 attached terminal deoxyabasic moiety
auggaccuaacauucgauctt

SEQ ID NO: 1657 - DNA, 21 bp, Artificial Sequence
  Synthetic
  misc_feature (1)..(3): 2'-deoxy-2'-fluoro
  misc_feature (4)..(7): 2'-deoxy
  misc_feature (8)..(12): 2'-deoxy-2'-fluoro
  misc_feature (13)..(13): 2'-deoxy
  misc_feature (14)..(19): 2'-deoxy-2'-fluoro
  misc_feature (1)..(19): ribonucleotide unmodified or modified as described for this sequence
  misc_feature (20)..(20): Phosphorothioate 3'-Internucleotide Linkage
uucaagguuuucacuuuuutt

SEQ ID NO: 1658 - DNA, 21 bp, Artificial Sequence
  Synthetic
  misc_feature (1)..(2): 2'-deoxy-2'-fluoro
  misc_feature (3)..(3): 2'-deoxy
  misc_feature (4)..(5): 2'-deoxy-2'-fluoro
  misc_feature (6)..(6): 2'-deoxy
  misc_feature (7)..(7): 2'-deoxy-2'-fluoro
  misc_feature (8)..(8): 2'-deoxy
  misc_feature (9)..(10): 2'-deoxy-2'-fluoro
  misc_feature (11)..(12): 2'-deoxy
  misc_feature (13)..(13): 2'-deoxy-2'-fluoro
  misc_feature (14)..(14): 2'-deoxy
  misc_feature (15)..(15): 2'-deoxy-2'-fluoro
  misc_feature (16)..(18): 2'-deoxy
  misc_feature (19)..(19): 2'-deoxy-2'-fluoro
  misc_feature (1)..(19): ribonucleotide unmodified or modified as described for this sequence
  misc_feature (20)..(20): Phosphorothioate 3'-Internucleotide Linkage
cugcugcguuagcaugagutt

SEQ ID NO: 1659 - DNA, 21 bp, Artificial Sequence
  Synthetic
  misc_feature (1)..(2): 2'-deoxy-2'-fluoro
  misc_feature (3)..(3): 2'-deoxy
  misc_feature (4)..(4): 2'-deoxy-2'-fluoro
  misc_feature (5)..(5): 2'-deoxy
  misc_feature (6)..(6): 2'-deoxy-2'-fluoro
  misc_feature (7)..(8): 2'-deoxy
  misc_feature (9)..(13): 2'-deoxy-2'-fluoro
  misc_feature (14)..(15): 2'-deoxy
  misc_feature (16)..(17): 2'-deoxy-2'-fluoro
  misc_feature (18)..(19): 2'-deoxy
  misc_feature (1)..(19): ribonucleotide unmodified or modified as described for this sequence
  misc_feature (20)..(20): Phosphorothioate 3'-Internucleotide Linkage
ccaugcaguucuuggucaatt

SEQ ID NO: 1660 - DNA, 21 bp, Artificial Sequence
  Synthetic
  misc_feature (1)..(1): 2'-deoxy-2'-fluoro
  misc_feature (2)..(4): 2'-deoxy
  misc_feature (5)..(7): 2'-deoxy-2'-fluoro
  misc_feature (8)..(8): 2'-deoxy
  misc_feature (9)..(9): 2'-deoxy-2'-fluoro
  misc_feature (10)..(10): 2'-deoxy
  misc_feature (11)..(11): 2'-deoxy-2'-fluoro
  misc_feature (12)..(13): 2'-deoxy
  misc_feature (14)..(18): 2'-deoxy-2'-fluoro
  misc_feature (19)..(19): 2'-deoxy
  misc_feature (1)..(19): ribonucleotide unmodified or modified as described for this sequence
  misc_feature (20)..(20): Phosphorothioate 3'-Internucleotide Linkage
uagguccaugcaguucuugtt

SEQ ID NO: 1661 - DNA, 21 bp, Artificial Sequence
  Synthetic
  misc_feature (1)..(2): 2'-deoxy
  misc_feature (3)..(3): 2'-deoxy-2'-fluoro
  misc_feature (4)..(4): 2'-deoxy
  misc_feature (5)..(6): 2'-deoxy-2'-fluoro
  misc_feature (7)..(9): 2'-deoxy
  misc_feature (10)..(12): 2'-deoxy-2'-fluoro
  misc_feature (13)..(13): 2'-deoxy
  misc_feature (14)..(14): 2'-deoxy-2'-fluoro
  misc_feature (15)..(15): 2'-deoxy
  misc_feature (16)..(16): 2'-deoxy-2'-fluoro
  misc_feature (17)..(18): 2'-deoxy
  misc_feature (19)..(19): 2'-deoxy-2'-fluoro
  misc_feature (1)..(19): ribonucleotide unmodified or modified as described for this sequence
  misc_feature (20)..(20): Phosphorothioate 3'-Internucleotide Linkage
aauguuagguccaugcagutt

SEQ ID NO: 1662 - DNA, 21 bp, Artificial Sequence
  Synthetic
  misc_feature (1)..(3): 2'-deoxy
  misc_feature (4)..(4): 2'-deoxy-2'-fluoro
  misc_feature (5)..(5): 2'-deoxy
  misc_feature (6)..(7): 2'-deoxy-2'-fluoro
  misc_feature (8)..(10): 2'-deoxy
  misc_feature (11)..(13): 2'-deoxy-2'-fluoro
  misc_feature (14)..(14): 2'-deoxy
  misc_feature (15)..(15): 2'-deoxy-2'-fluoro
  misc_feature (16)..(16): 2'-deoxy
  misc_feature (17)..(17): 2'-deoxy-2'-fluoro
  misc_feature (18)..(19): 2'-deoxy
  misc_feature (1)..(19): ribonucleotide unmodified or modified as described for this sequence
  misc_feature (20)..(20): Phosphorothioate 3'-Internucleotide Linkage
gaauguuagguccaugcagtt

SEQ ID NO: 1663 - DNA, 21 bp, Artificial Sequence
  Synthetic
  misc_feature (1)..(2): 2'-deoxy-2'-fluoro
  misc_feature (3)..(5): 2'-deoxy
  misc_feature (6)..(6): 2'-deoxy-2'-fluoro
  misc_feature (7)..(7): 2'-deoxy
  misc_feature (8)..(9): 2'-deoxy-2'-fluoro
  misc_feature (10)..(12): 2'-deoxy
  misc_feature (13)..(15): 2'-deoxy-2'-fluoro
  misc_feature (16)..(16): 2'-deoxy
  misc_feature (17)..(17): 2'-deoxy-2'-fluoro
  misc_feature (18)..(18): 2'-deoxy
  misc_feature (19)..(19): 2'-deoxy-2'-fluoro
  misc_feature (1)..(19): ribonucleotide unmodified or modified as described for this sequence
  misc_feature (20)..(20): Phosphorothioate 3'-Internucleotide Linkage
ucgaauguuagguccaugctt

SEQ ID NO: 1664 - DNA, 21 bp, Artificial Sequence
  Synthetic
  misc_feature (1)..(2): 2'-deoxy
  misc_feature (3)..(4): 2'-deoxy-2'-fluoro
  misc_feature (5)..(7): 2'-deoxy
  misc_feature (8)..(8): 2'-deoxy-2'-fluoro
  misc_feature (9)..(9): 2'-deoxy
  misc_feature (10)..(11): 2'-deoxy-2'-fluoro
  misc_feature (12)..(14): 2'-deoxy
  misc_feature (15)..(17): 2'-deoxy-2'-fluoro
  misc_feature (18)..(18): 2'-deoxy
  misc_feature (19)..(19): 2'-deoxy-2'-fluoro
  misc_feature (1)..(19): ribonucleotide unmodified or modified as described for this sequence
  misc_feature (20)..(20): Phosphorothioate 3'-Internucleotide Linkage
gaucgaauguuagguccautt

SEQ ID NO: 1665 - DNA, 21 bp, Artificial Sequence
  Synthetic
  misc_feature (1)..(6): 2'-O-methyl
  misc_feature (7)..(7): 2'-deoxy-2'-fluoro
  misc_feature (8)..(12): 2'-O-methyl
  misc_feature (13)..(16): 2'-deoxy-2'-fluoro
  misc_feature (17)..(19): 2'-O-methyl
  misc_feature (1)..(19): ribonucleotide unmodified or modified as described for this sequence
  misc_feature (20)..(20): Phosphorothioate 3'-Internucleotide Linkage
aaaaagugaaaaccuugaatt

SEQ ID NO: 1666 - DNA, 21 bp, Artificial Sequence
  Synthetic
  misc_feature (1)..(1): 2'-O-methyl
  misc_feature (2)..(4): 2'-deoxy-2'-fluoro
  misc_feature (5)..(5): 2'-O-methyl
  misc_feature (6)..(6): 2'-deoxy-2'-fluoro
  misc_feature (7)..(7): 2'-O-methyl
  misc_feature (8)..(9): 2'-deoxy-2'-fluoro
  misc_feature (10)..(11): 2'-O-methyl
  misc_feature (12)..(12): 2'-deoxy-2'-fluoro
  misc_feature (13)..(13): 2'-O-methyl
  misc_feature (14)..(14): 2'-deoxy-2'-fluoro
  misc_feature (15)..(16): 2'-O-methyl
  misc_feature (17)..(17): 2'-deoxy-2'-fluoro
  misc_feature (18)..(19): 2'-O-methyl
  misc_feature (1)..(19): ribonucleotide unmodified or modified as described for this sequence
  misc_feature (20)..(20): Phosphorothioate 3'-Internucleotide Linkage
acucaugcuaacgcagcagtt

SEQ ID NO: 1667 - DNA, 21 bp, Artificial Sequence
  Synthetic
  misc_feature (1)..(2): 2'-deoxy-2'-fluoro
  misc_feature (3)..(4): 2'-O-methyl
  misc_feature (5)..(6): 2'-deoxy-2'-fluoro
  misc_feature (7)..(11): 2'-O-methyl
  misc_feature (12)..(13): 2'-deoxy-2'-fluoro
  misc_feature (14)..(14): 2'-O-methyl
  misc_feature (15)..(15): 2'-deoxy-2'-fluoro
  misc_feature (16)..(16): 2'-O-methyl
  misc_feature (17)..(17): 2'-deoxy-2'-fluoro
  misc_feature (18)..(19): 2'-O-methyl
  misc_feature (1)..(19): ribonucleotide unmodified or modified as described for this sequence
  misc_feature (20)..(20): Phosphorothioate 3'-Internucleotide Linkage
uugaccaagaacugcauggtt

SEQ ID NO: 1668 - DNA, 21 bp, Artificial Sequence
  Synthetic
  misc_feature (1)..(1): 2'-deoxy-2'-fluoro
  misc_feature (2)..(6): 2'-O-methyl
  misc_feature (7)..(8): 2'-deoxy-2'-fluoro
  misc_feature (9)..(9): 2'-O-methyl
  misc_feature (10)..(10): 2'-deoxy-2'-fluoro
  misc_feature (11)..(11): 2'-O-methyl
  misc_feature (12)..(12): 2'-deoxy-2'-fluoro
  misc_feature (13)..(15): 2'-O-methyl
  misc_feature (16)..(18): 2'-deoxy-2'-fluoro
  misc_feature (19)..(19): 2'-O-methyl
  misc_feature (1)..(19): ribonucleotide unmodified or modified as described for this sequence
  misc_feature (20)..(20): Phosphorothioate 3'-Internucleotide Linkage
caagaacugcauggaccuatt

SEQ ID NO: 1669 - DNA, 21 bp, Artificial Sequence
  Synthetic
  misc_feature (1)..(1): 2'-O-methyl
  misc_feature (2)..(3): 2'-deoxy-2'-fluoro
  misc_feature (4)..(4): 2'-O-methyl
  misc_feature (5)..(5): 2'-deoxy-2'-fluoro
  misc_feature (6)..(6): 2'-O-methyl
  misc_feature (7)..(7): 2'-deoxy-2'-fluoro
  misc_feature (8)..(10): 2'-O-methyl
  misc_feature (11)..(13): 2'-deoxy-2'-fluoro
  misc_feature (14)..(15): 2'-O-methyl
  misc_feature (16)..(16): 2'-deoxy-2'-fluoro
  misc_feature (17)..(17): 2'-O-methyl
  misc_feature (18)..(19): 2'-deoxy-2'-fluoro
  misc_feature (1)..(19): ribonucleotide unmodified or modified as described for this sequence
  misc_feature (20)..(20): Phosphorothioate 3'-Internucleotide Linkage
acugcauggaccuaacauutt

SEQ ID NO: 1670 - DNA, 21 bp, Artificial Sequence
  Synthetic
  misc_feature (1)..(2): 2'-deoxy-2'-fluoro
  misc_feature (3)..(3): 2'-O-methyl
  misc_feature (4)..(4): 2'-deoxy-2'-fluoro
  misc_feature (5)..(5): 2'-O-methyl
  misc_feature (6)..(6): 2'-deoxy-2'-fluoro
  misc_feature (7)..(9): 2'-O-methyl
  misc_feature (10)..(12): 2'-deoxy-2'-fluoro
  misc_feature (13)..(14): 2'-O-methyl
  misc_feature (15)..(15): 2'-deoxy-2'-fluoro
  misc_feature (16)..(16): 2'-O-methyl
  misc_feature (17)..(19): 2'-deoxy-2'-fluoro
  misc_feature (1)..(19): ribonucleotide unmodified or modified as described for this sequence
  misc_feature (20)..(20): Phosphorothioate 3'-Internucleotide Linkage
cugcauggaccuaacauuctt

SEQ ID NO: 1671 - DNA, 21 bp, Artificial Sequence
  Synthetic
  misc_feature (1)..(1): 2'-O-methyl
  misc_feature (2)..(2): 2'-deoxy-2'-fluoro
  misc_feature (3)..(3): 2'-O-methyl
  misc_feature (4)..(4): 2'-deoxy-2'-fluoro
  misc_feature (5)..(7): 2'-O-methyl
  misc_feature (8)..(10): 2'-deoxy-2'-fluoro
  misc_feature (11)..(12): 2'-O-methyl
  misc_feature (13)..(13): 2'-deoxy-2'-fluoro
  misc_feature (14)..(14): 2'-O-methyl
  misc_feature (15)..(17): 2'-deoxy-2'-fluoro
  misc_feature (18)..(19): 2'-O-methyl
  misc_feature (1)..(19): ribonucleotide unmodified or modified as described for this sequence
  misc_feature (20)..(20): Phosphorothioate 3'-Internucleotide Linkage
gcauggaccuaacauucgatt

SEQ ID NO: 1672 - DNA, 21 bp, Artificial Sequence
  Synthetic
  misc_feature (1)..(1): 2'-O-methyl
  misc_feature (2)..(2): 2'-deoxy-2'-fluoro
  misc_feature (3)..(5): 2'-O-methyl
  misc_feature (6)..(8): 2'-deoxy-2'-fluoro
  misc_feature (9)..(10): 2'-O-methyl
  misc_feature (11)..(11): 2'-deoxy-2'-fluoro
  misc_feature (12)..(12): 2'-O-methyl
  misc_feature (13)..(15): 2'-deoxy-2'-fluoro
  misc_feature (16)..(17): 2'-O-methyl
  misc_feature (18)..(19): 2'-deoxy-2'-fluoro
  misc_feature (1)..(19): ribonucleotide unmodified or modified as described for this sequence
  misc_feature (20)..(20): Phosphorothioate 3'-Internucleotide Linkage
auggaccuaacauucgauctt

SEQ ID NO: 1673 - DNA, 21 bp, Artificial Sequence
  Synthetic
  misc_feature (1)..(3): 2'-deoxy-2'-fluoro
  misc_feature (4)..(7): 2'-O-methyl
  misc_feature (8)..(12): 2'-deoxy-2'-fluoro
  misc_feature (13)..(13): 2'-O-methyl
  misc_feature (14)..(19): 2'-deoxy-2'-fluoro
  misc_feature (1)..(19): ribonucleotide unmodified or modified as described for this sequence
  misc_feature (20)..(20): Phosphorothioate 3'-Internucleotide Linkage
uucaagguuuucacuuuuutt

SEQ ID NO: 1674 - DNA, 21 bp, Artificial Sequence
  Synthetic
  misc_feature (1)..(2): 2'-deoxy-2'-fluoro
  misc_feature (3)..(3): 2'-O-methyl
  misc_feature (4)..(5): 2'-deoxy-2'-fluoro
  misc_feature (6)..(6): 2'-O-methyl
  misc_feature (7)..(7): 2'-deoxy-2'-fluoro
  misc_feature (8)..(8): 2'-O-methyl
  misc_feature (9)..(10): 2'-deoxy-2'-fluoro
  misc_feature (11)..(12): 2'-O-methyl
  misc_feature (13)..(13): 2'-deoxy-2'-fluoro
  misc_feature (14)..(14): 2'-O-methyl
  misc_feature (15)..(15): 2'-deoxy-2'-fluoro
  misc_feature (16)..(18): 2'-O-methyl
  misc_feature (19)..(19): 2'-deoxy-2'-fluoro
  misc_feature (1)..(19): ribonucleotide unmodified or modified as described for this sequence
  misc_feature (20)..(20): Phosphorothioate 3'-Internucleotide Linkage
cugcugcguuagcaugagutt

SEQ ID NO: 1675 - DNA, 21 bp, Artificial Sequence
  Synthetic
  misc_feature (1)..(2): 2'-deoxy-2'-fluoro
  misc_feature (3)..(3): 2'-O-methyl
  misc_feature (4)..(4): 2'-deoxy-2'-fluoro
  misc_feature (5)..(5): 2'-O-methyl
  misc_feature (6)..(6): 2'-deoxy-2'-fluoro
  misc_feature (7)..(8): 2'-O-methyl
  misc_feature (9)..(13): 2'-deoxy-2'-fluoro
  misc_feature (14)..(15): 2'-O-methyl
  misc_feature (16)..(17): 2'-deoxy-2'-fluoro
  misc_feature (18)..(19): 2'-O-methyl
  misc_feature (1)..(19): ribonucleotide unmodified or modified as described for this sequence
  misc_feature (20)..(20): Phosphorothioate 3'-Internucleotide Linkage
ccaugcaguucuuggucaatt

SEQ ID NO: 1676 - DNA, 21 bp, Artificial Sequence
  Synthetic
  misc_feature (1)..(1): 2'-deoxy-2'-fluoro
  misc_feature (2)..(4): 2'-O-methyl
  misc_feature (5)..(7): 2'-deoxy-2'-fluoro
  misc_feature (8)..(8): 2'-O-methyl
  misc_feature (9)..(9): 2'-deoxy-2'-fluoro
  misc_feature (10)..(10): 2'-O-methyl
  misc_feature (11)..(11): 2'-deoxy-2'-fluoro
  misc_feature (12)..(13): 2'-O-methyl
  misc_feature (14)..(18): 2'-deoxy-2'-fluoro
  misc_feature (19)..(19): 2'-O-methyl
  misc_feature (1)..(19): ribonucleotide unmodified or modified as described for this sequence
  misc_feature (20)..(20): Phosphorothioate 3'-Internucleotide Linkage
uagguccaugcaguucuugtt

SEQ ID NO: 1677 - DNA, 21 bp, Artificial Sequence
  Synthetic
  misc_feature (1)..(2): 2'-O-methyl
  misc_feature (3)..(3): 2'-deoxy-2'-fluoro
  misc_feature (4)..(4): 2'-O-methyl
  misc_feature (5)..(6): 2'-deoxy-2'-fluoro
  misc_feature (7)..(9): 2'-O-methyl
  misc_feature (10)..(12): 2'-deoxy-2'-fluoro
  misc_feature (13)..(13): 2'-O-methyl
  misc_feature (14)..(14): 2'-deoxy-2'-fluoro
  misc_feature (15)..(15): 2'-O-methyl
  misc_feature (16)..(16): 2'-deoxy-2'-fluoro
  misc_feature (17)..(18): 2'-O-methyl
  misc_feature (19)..(19): 2'-deoxy-2'-fluoro
  misc_feature (1)..(19): ribonucleotide unmodified or modified as described for this sequence
  misc_feature (20)..(20): Phosphorothioate 3'-Internucleotide Linkage
aauguuagguccaugcagutt

SEQ ID NO: 1678 - DNA, 21 bp, Artificial Sequence
  Synthetic
  misc_feature (1)..(3): 2'-O-methyl
  misc_feature (4)..(4): 2'-deoxy-2'-fluoro
  misc_feature (5)..(5): 2'-O-methyl
  misc_feature (6)..(7): 2'-deoxy-2'-fluoro
  misc_feature (8)..(10): 2'-O-methyl
  misc_feature (11)..(13): 2'-deoxy-2'-fluoro
  misc_feature (14)..(14): 2'-O-methyl
  misc_feature (15)..(15): 2'-deoxy-2'-fluoro
  misc_feature (16)..(16): 2'-O-methyl
  misc_feature (17)..(17): 2'-deoxy-2'-fluoro
  misc_feature (18)..(19): 2'-O-methyl
  misc_feature (1)..(19): ribonucleotide unmodified or modified as described for this sequence
  misc_feature (20)..(20): Phosphorothioate 3'-Internucleotide Linkage
gaauguuagguccaugcagtt

SEQ ID NO: 1679 - DNA, 21 bp, Artificial Sequence
  Synthetic
  misc_feature (1)..(2): 2'-deoxy-2'-fluoro
  misc_feature (3)..(5): 2'-O-methyl
  misc_feature (6)..(6): 2'-deoxy-2'-fluoro
  misc_feature (7)..(7): 2'-O-methyl
  misc_feature (8)..(9): 2'-deoxy-2'-fluoro
  misc_feature (10)..(12): 2'-O-methyl
  misc_feature (13)..(15): 2'-deoxy-2'-fluoro
  misc_feature (16)..(16): 2'-O-methyl
  misc_feature (17)..(17): 2'-deoxy-2'-fluoro
  misc_feature (18)..(18): 2'-O-methyl
  misc_feature (19)..(19): 2'-deoxy-2'-fluoro
  misc_feature (1)..(19): ribonucleotide unmodified or modified as described for this sequence
  misc_feature (20)..(20): Phosphorothioate 3'-Internucleotide Linkage
ucgaauguuagguccaugctt

SEQ ID NO: 1680 - DNA, 21 bp, Artificial Sequence
  Synthetic
  misc_feature (1)..(2): 2'-O-methyl
  misc_feature (3)..(4): 2'-deoxy-2'-fluoro
  misc_feature (5)..(7): 2'-O-methyl
  misc_feature (8)..(8): 2'-deoxy-2'-fluoro
  misc_feature (9)..(9): 2'-O-methyl
  misc_feature (10)..(11): 2'-deoxy-2'-fluoro
  misc_feature (12)..(14): 2'-O-methyl
  misc_feature (15)..(17): 2'-deoxy-2'-fluoro
  misc_feature (18)..(18): 2'-O-methyl
  misc_feature (19)..(19): 2'-deoxy-2'-fluoro
  misc_feature (1)..(19): ribonucleotide unmodified or modified as described for this sequence
  misc_feature (20)..(20): Phosphorothioate 3'-Internucleotide Linkage
gaucgaauguuagguccautt

SEQ ID NO: 1681 - DNA, 21 bp, Artificial Sequence
  inverted control/siNA sense
  misc_feature (1)..(3): 2'-deoxy
  misc_feature (1)..(1): 5'-3 attached terminal deoxyabasic moiety
  misc_feature (4)..(7): 2'-deoxy-2'-fluoro
  misc_feature (8)..(12): 2'-deoxy
  misc_feature (13)..(13): 2'-deoxy-2'-fluoro
  misc_feature (14)..(19): 2'-deoxy
  misc_feature (1)..(19): ribonucleotide unmodified or modified as described for this sequence
  misc_feature (21)..(21): 3'-3 attached terminal deoxyabasic moiety
aaguuccaaaagugaaaaatt

SEQ ID NO: 1682 - DNA, 21 bp, Artificial Sequence
  inverted control/siNA sense
  misc_feature (1)..(2): 2'-deoxy
  misc_feature (1)..(1): 5'-3 attached terminal deoxyabasic moiety
  misc_feature (3)..(3): 2'-deoxy-2'-fluoro
  misc_feature (4)..(5): 2'-deoxy
  misc_feature (6)..(6): 2'-deoxy-2'-fluoro
  misc_feature (7)..(7): 2'-deoxy
  misc_feature (8)..(8): 2'-deoxy-2'-fluoro
  misc_feature (9)..(10): 2'-deoxy
  misc_feature (11)..(12): 2'-deoxy-2'-fluoro
  misc_feature (13)..(13): 2'-deoxy
  misc_feature (14)..(14): 2'-deoxy-2'-fluoro
  misc_feature (15)..(15): 2'-deoxy
  misc_feature (16)..(18): 2'-deoxy-2'-fluoro
  misc_feature (19)..(19): 2'-deoxy
  misc_feature (1)..(19): ribonucleotide unmodified or modified as described for this sequence
  misc_feature (21)..(21): 3'-3 attached terminal deoxyabasic moiety
gacgacgcaaucguacucatt

SEQ ID NO: 1683 - DNA, 21 bp, Artificial Sequence
  inverted control/siNA sense
  misc_feature (1)..(2): 2'-deoxy
  misc_feature (1)..(1): 5'-3 attached terminal deoxyabasic moiety
  misc_feature (3)..(3): 2'-deoxy-2'-fluoro
  misc_feature (4)..(4): 2'-deoxy
  misc_feature (5)..(5): 2'-deoxy-2'-fluoro
  misc_feature (6)..(6): 2'-deoxy
  misc_feature (7)..(8): 2'-deoxy-2'-fluoro
  misc_feature (9)..(13): 2'-deoxy
  misc_feature (14)..(15): 2'-deoxy-2'-fluoro
  misc_feature (16)..(17): 2'-deoxy
  misc_feature (18)..(19): 2'-deoxy-2'-fluoro
  misc_feature (1)..(19): ribonucleotide unmodified or modified as described for this sequence
  misc_feature (21)..(21): 3'-3 attached terminal deoxyabasic moiety
gguacgucaagaaccaguutt

SEQ ID NO: 1684 - DNA, 21 bp, Artificial Sequence
  inverted control/siNA sense
  misc_feature (1)..(1): 2'-deoxy
  misc_feature (1)..(1): 5'-3 attached terminal deoxyabasic moiety
  misc_feature (2)..(4): 2'-deoxy-2'-fluoro
  misc_feature (5)..(7): 2'-deoxy
  misc_feature (8)..(8): 2'-deoxy-2'-fluoro
  misc_feature (9)..(9): 2'-deoxy
  misc_feature (10)..(10): 2'-deoxy-2'-fluoro
  misc_feature (11)..(11): 2'-deoxy
  misc_feature (12)..(13): 2'-deoxy-2'-fluoro
  misc_feature (14)..(18): 2'-deoxy
  misc_feature (19)..(19): 2'-deoxy-2'-fluoro
  misc_feature (1)..(19): ribonucleotide unmodified or modified as described for this sequence
  misc_feature (21)..(21): 3'-3 attached terminal deoxyabasic moiety
auccagguacgucaagaactt

SEQ ID NO: 1685 - DNA, 21 bp, Artificial Sequence
  inverted control/siNA sense
  misc_feature (1)..(2): 2'-deoxy-2'-fluoro
  misc_feature (1)..(1): 5'-3 attached terminal deoxyabasic moiety
  misc_feature (3)..(3): 2'-deoxy
  misc_feature (4)..(4): 2'-deoxy-2'-fluoro
  misc_feature (5)..(6): 2'-deoxy
  misc_feature (7)..(9): 2'-deoxy-2'-fluoro
  misc_feature (10)..(12): 2'-deoxy
  misc_feature (13)..(13): 2'-deoxy-2'-fluoro
  misc_feature (14)..(14): 2'-deoxy
  misc_feature (15)..(15): 2'-deoxy-2'-fluoro
  misc_feature (16)..(16): 2'-deoxy
  misc_feature (17)..(18): 2'-deoxy-2'-fluoro
  misc_feature (19)..(19): 2'-deoxy
  misc_feature (1)..(19): ribonucleotide unmodified or modified as described for this sequence
  misc_feature (21)..(21): 3'-3 attached terminal deoxyabasic moiety
uuacaauccagguacgucatt

SEQ ID NO: 1686 - DNA, 21 bp, Artificial Sequence
  inverted control/siNA sense
  misc_feature (1)..(3): 2'-deoxy-2'-fluoro
  misc_feature (1)..(1): 5'-3 attached terminal deoxyabasic moiety
  misc_feature (4)..(4): 2'-deoxy
  misc_feature (5)..(5): 2'-deoxy-2'-fluoro
  misc_feature (6)..(7): 2'-deoxy
  misc_feature (8)..(10): 2'-deoxy-2'-fluoro
  misc_feature (11)..(13): 2'-deoxy
  misc_feature (14)..(14): 2'-deoxy-2'-fluoro
  misc_feature (15)..(15): 2'-deoxy
  misc_feature (16)..(16): 2'-deoxy-2'-fluoro
  misc_feature (17)..(17): 2'-deoxy
  misc_feature (18)..(19): 2'-deoxy-2'-fluoro
  misc_feature (1)..(19): ribonucleotide unmodified or modified as described for this sequence
  misc_feature (21)..(21): 3'-3 attached terminal deoxyabasic moiety
cuuacaauccagguacguctt

SEQ ID NO: 1687 - DNA, 21 bp, Artificial Sequence
  inverted control/siNA sense
  misc_feature (1)..(2): 2'-deoxy
  misc_feature (1)..(1): 5'-3 attached terminal deoxyabasic moiety
  misc_feature (3)..(5): 2'-deoxy-2'-fluoro
  misc_feature (6)..(6): 2'-deoxy
  misc_feature (7)..(7): 2'-deoxy-2'-fluoro
  misc_feature (8)..(9): 2'-deoxy
  misc_feature (10)..(12): 2'-deoxy-2'-fluoro
  misc_feature (13)..(15): 2'-deoxy
  misc_feature (16)..(16): 2'-deoxy-2'-fluoro
  misc_feature (17)..(17): 2'-deoxy
  misc_feature (18)..(18): 2'-deoxy-2'-fluoro
  misc_feature (19)..(19): 2'-deoxy
  misc_feature (1)..(19): ribonucleotide unmodified or modified as described for this sequence
  misc_feature (21)..(21): 3'-3 attached terminal deoxyabasic moiety
agcuuacaauccagguacgtt

SEQ ID NO: 1688 - DNA, 21 bp, Artificial Sequence
  inverted control/siNA sense
  misc_feature (1)..(2): 2'-deoxy-2'-fluoro
  misc_feature (1)..(1): 5'-3 attached terminal deoxyabasic moiety
  misc_feature (3)..(4): 2'-deoxy
  misc_feature (5)..(7): 2'-deoxy-2'-fluoro
  misc_feature (8)..(8): 2'-deoxy
  misc_feature (9)..(9): 2'-deoxy-2'-fluoro
  misc_feature (10)..(11): 2'-deoxy
  misc_feature (12)..(14): 2'-deoxy-2'-fluoro
  misc_feature (15)..(17): 2'-deoxy
  misc_feature (18)..(18): 2'-deoxy-2'-fluoro
  misc_feature (19)..(19): 2'-deoxy
  misc_feature (1)..(19): ribonucleotide unmodified or modified as described for this sequence
  misc_feature (21)..(21): 3'-3 attached terminal deoxyabasic moiety
cuagcuuacaauccagguatt

SEQ ID NO: 1689 - DNA, 21 bp, Artificial Sequence
  inverted control/siNA antisense
  misc_feature (1)..(6): 2'-deoxy-2'-fluoro
  misc_feature (7)..(7): 2'-O-methyl
  misc_feature (8)..(12): 2'-deoxy-2'-fluoro
  misc_feature (13)..(16): 2'-O-methyl
  misc_feature (17)..(19): 2'-deoxy-2'-fluoro
  misc_feature (1)..(19): ribonucleotide unmodified or modified as described for this sequence
  misc_feature (20)..(20): Phosphorothioate 3'-Internucleotide Linkage
uuuuucacuuuuggaacuutt

SEQ ID NO: 1690 - DNA, 21 bp, Artificial Sequence
  inverted control/siNA antisense
  misc_feature (1)..(1): 2'-deoxy-2'-fluoro
  misc_feature (2)..(4): 2'-O-methyl
  misc_feature (5)..(5): 2'-deoxy-2'-fluoro
  misc_feature (6)..(6): 2'-O-methyl
  misc_feature (7)..(7): 2'-deoxy-2'-fluoro
  misc_feature (8)..(9): 2'-O-methyl
  misc_feature (10)..(11): 2'-deoxy-2'-fluoro
  misc_feature (12)..(12): 2'-O-methyl
  misc_feature (13)..(13): 2'-deoxy-2'-fluoro
  misc_feature (14)..(14): 2'-O-methyl
  misc_feature (15)..(16): 2'-deoxy-2'-fluoro
  misc_feature (17)..(17): 2'-O-methyl
  misc_feature (18)..(19): 2'-deoxy-2'-fluoro
  misc_feature (1)..(19): ribonucleotide unmodified or modified as described for this sequence
  misc_feature (20)..(20): Phosphorothioate 3'-Internucleotide Linkage
ugaguacgauugcgucguctt

SEQ ID NO: 1691 - DNA, 21 bp, Artificial Sequence
  inverted control/siNA antisense
  misc_feature (1)..(2): 2'-O-methyl
  misc_feature (3)..(4): 2'-deoxy-2'-fluoro
  misc_feature (5)..(6): 2'-O-methyl
  misc_feature (7)..(11): 2'-deoxy-2'-fluoro
  misc_feature (12)..(13): 2'-O-methyl
  misc_feature (14)..(14): 2'-deoxy-2'-fluoro
  misc_feature (15)..(15): 2'-O-methyl
  misc_feature (16)..(16): 2'-deoxy-2'-fluoro
  misc_feature (17)..(17): 2'-O-methyl
  misc_feature (18)..(19): 2'-deoxy-2'-fluoro
  misc_feature (1)..(19): ribonucleotide unmodified or modified as described for this sequence
  misc_feature (20)..(20): Phosphorothioate 3'-Internucleotide Linkage
aacugguucuugacguacctt

SEQ ID NO: 1692 - DNA, 21 bp, Artificial Sequence
  inverted control/siNA antisense
  misc_feature (1)..(1): 2'-O-methyl
  misc_feature (2)..(6): 2'-deoxy-2'-fluoro
  misc_feature (7)..(8): 2'-O-methyl
  misc_feature (9)..(9): 2'-deoxy-2'-fluoro
  misc_feature (10)..(10): 2'-O-methyl
  misc_feature (11)..(11): 2'-deoxy-2'-fluoro
  misc_feature (12)..(12): 2'-O-methyl
  misc_feature (13)..(15): 2'-deoxy-2'-fluoro
  misc_feature (16)..(18): 2'-O-methyl
  misc_feature (19)..(19): 2'-deoxy-2'-fluoro
  misc_feature (1)..(19): ribonucleotide unmodified or modified as described for this sequence
  misc_feature (20)..(20): Phosphorothioate 3'-Internucleotide Linkage
guucuugacguaccuggautt

SEQ ID NO: 1693 - DNA, 21 bp, Artificial Sequence
  inverted control/siNA antisense
  misc_feature (1)..(1): 2'-deoxy-2'-fluoro
  misc_feature (2)..(3): 2'-O-methyl
  misc_feature (4)..(4): 2'-deoxy-2'-fluoro
  misc_feature (5)..(5): 2'-O-methyl
  misc_feature (6)..(6): 2'-deoxy-2'-fluoro
  misc_feature (7)..(7): 2'-O-methyl
  misc_feature (8)..(10): 2'-deoxy-2'-fluoro
  misc_feature (11)..(13): 2'-O-methyl
  misc_feature (14)..(15): 2'-deoxy-2'-fluoro
  misc_feature (16)..(16): 2'-O-methyl
  misc_feature (17)..(17): 2'-deoxy-2'-fluoro
  misc_feature (18)..(19): 2'-O-methyl
  misc_feature (1)..(19): ribonucleotide unmodified or modified as described for this sequence
  misc_feature (20)..(20): Phosphorothioate 3'-Internucleotide Linkage
ugacguaccuggauuguaatt

SEQ ID NO: 1694 - DNA, 21 bp, Artificial Sequence
  inverted control/siNA antisense
  misc_feature (1)..(2): 2'-O-methyl
  misc_feature (3)..(3): 2'-deoxy-2'-fluoro
  misc_feature (4)..(4): 2'-O-methyl
  misc_feature (5)..(5): 2'-deoxy-2'-fluoro
  misc_feature (6)..(6): 2'-O-methyl
  misc_feature (7)..(9): 2'-deoxy-2'-fluoro
  misc_feature (10)..(12): 2'-O-methyl
  misc_feature (13)..(14): 2'-deoxy-2'-fluoro
  misc_feature (15)..(15): 2'-O-methyl
  misc_feature (16)..(16): 2'-deoxy-2'-fluoro
  misc_feature (17)..(19): 2'-O-methyl
  misc_feature (1)..(19): ribonucleotide unmodified or modified as described for this sequence
  misc_feature (20)..(20): Phosphorothioate 3'-Internucleotide Linkage
gacguaccuggauuguaagtt

SEQ ID NO: 1695 - DNA, 21 bp, Artificial Sequence
  inverted control/siNA antisense
  misc_feature (1)..(1): 2'-deoxy-2'-fluoro
  misc_feature (2)..(2): 2'-O-methyl
  misc_feature (3)..(3): 2'-deoxy-2'-fluoro
  misc_feature (4)..(4): 2'-O-methyl
  misc_feature (5)..(7): 2'-deoxy-2'-fluoro
  misc_feature (8)..(10): 2'-O-methyl
  misc_feature (11)..(12): 2'-deoxy-2'-fluoro
  misc_feature (13)..(13): 2'-O-methyl
  misc_feature (14)..(14): 2'-deoxy-2'-fluoro
  misc_feature (15)..(17): 2'-O-methyl
  misc_feature (18)..(19): 2'-deoxy-2'-fluoro
  misc_feature (1)..(19): ribonucleotide unmodified or modified as described for this sequence
  misc_feature (20)..(20): Phosphorothioate 3'-Internucleotide Linkage
cguaccuggauuguaagcutt

SEQ ID NO: 1696 - DNA, 21 bp, Artificial Sequence
  inverted control/siNA antisense
  misc_feature (1)..(1): 2'-deoxy-2'-fluoro
  misc_feature (2)..(2): 2'-O-methyl
  misc_feature (3)..(5): 2'-deoxy-2'-fluoro
  misc_feature (6)..(8): 2'-O-methyl
  misc_feature (9)..(10): 2'-deoxy-2'-fluoro
  misc_feature (11)..(11): 2'-O-methyl
  misc_feature (12)..(12): 2'-deoxy-2'-fluoro
  misc_feature (13)..(15): 2'-O-methyl
  misc_feature (16)..(17): 2'-deoxy-2'-fluoro
  misc_feature (18)..(19): 2'-O-methyl
  misc_feature (1)..(19): ribonucleotide unmodified or modified as described for this sequence
  misc_feature (20)..(20): Phosphorothioate 3'-Internucleotide Linkage
uaccuggauuguaagcuagtt

SEQ ID NO: 1697 - DNA, 21 bp, Artificial Sequence
  Synthetic
  misc_feature (1)..(1): 5'-3 attached terminal deoxyabasic moiety
  misc_feature (21)..(21): 3'-3 attached terminal deoxyabasic moiety
  misc_feature (1)..(19): n stands for any ribonucleotide
  misc_feature (20)..(21): n stands for any nucleotide
nnnnnnnnnnnnnnnnnnnnn

SEQ ID NO: 1698 - DNA, 21 bp, Artificial Sequence
  Synthetic
  misc_feature (20)..(20): Phosphorothioate 3'-Internucleotide Linkage
  misc_feature (1)..(19): n stands for any ribonucleotide
  misc_feature (20)..(21): n stands for any nucleotide
  misc_feature (21)..(21): 3'-3 attached terminal glyceryl moiety
nnnnnnnnnnnnnnnnnnnnn

SEQ ID NO: 1699 - DNA, 21 bp, Artificial Sequence
  Synthetic
  misc_feature (1)..(19): n stands for any nucleotide wherein any pyrimidine nucleotide present is 2'-Fluoro and any purine nuc leotide present is 2'-O-methyl
  misc_feature (20)..(21): n stands for any nucleotide
nnnnnnnnnnnnnnnnnnnnn

SEQ ID NO: 1700 - DNA, 21 bp, Artificial Sequence
  Synthetic
  misc_feature (1)..(19): n stands for any nucleotide wherein any pyrimidine nucleotide present is 2'-Fluoro and any purine nuc leotide present is 2'-O-methyl
  misc_feature (20)..(21): n stands for any nucleotide
  misc_feature (21)..(21): 3'-3 attached terminal glyceryl moiety
  misc_feature (20)..(20): Phosphorothioate 3'-Internucleotide Linkage
nnnnnnnnnnnnnnnnnnnnn

SEQ ID NO: 1701 - DNA, 21 bp, Artificial Sequence
  Synthetic
  misc_feature (1)..(19): n stands for any nucleotide wherein any pyrimidine nucleotide present is 2'-O-methyl or 2'-Fluoro
  misc_feature (20)..(21): n stands for any nucleotide
  misc_feature (1)..(1): 5'-3 attached terminal deoxyabasic moiety
  misc_feature (21)..(21): 3'-3 attached terminal deoxyabasic moiety
nnnnnnnnnnnnnnnnnnnnn

SEQ ID NO: 1702 - DNA, 21 bp, Artificial Sequence
  Synthetic
  misc_feature (1)..(19): n stands for any nucleotide wherein any pyrimidine nucleotide present is 2'-Fluoro
  misc_feature (20)..(20): Phosphorothioate 3'-Internucleotide Linkage
  misc_feature (20)..(21): n stands for any nucleotide
  misc_feature (21)..(21): 3'-3 attached terminal glyceryl moiety
nnnnnnnnnnnnnnnnnnnnn

SEQ ID NO: 1703 - DNA, 21 bp, Artificial Sequence
  Synthetic
  misc_feature (1)..(19): n stands for any nucleotide wherein any pyrimidine nucleotide present is 2'-Fluoro and any purine nuc leotide present is 2'-Deoxy
  misc_feature (20)..(21): n stands for any nucleotide
  misc_feature (1)..(1): 5'-3 attached terminal deoxyabasic moiety
  misc_feature (21)..(21): 3'-3 attached terminal deoxyabasic moiety
nnnnnnnnnnnnnnnnnnnnn

SEQ ID NO: 1704 - DNA, 21 bp, Artificial Sequence
  Synthetic
  misc_feature (1)..(19): n stands for any nucleotide wherein any pyrimidine nucleotide present is 2'-Fluoro
  misc_feature (20)..(21): n stands for any nucleotide
  misc_feature (1)..(1): 5'-3 attached terminal deoxyabasic moiety
  misc_feature (21)..(21): 3'-3 attached terminal deoxyabasic moiety
nnnnnnnnnnnnnnnnnnnnn

SEQ ID NO: 1705 - DNA, 21 bp, Artificial Sequence
  Synthetic
  misc_feature (1)..(19): n stands for any nucleotide wherein any pyrimidine nucleotide present is 2'-Fluoro and any purine nuc leotide present is 2'-Deoxy
  misc_feature (20)..(20): Phosphorothioate 3'-Internucleotide Linkage
  misc_feature (20)..(21): n stands for any nucleotide
  misc_feature (21)..(21): 3'-3 attached terminal glyceryl moiety
nnnnnnnnnnnnnnnnnnnnn

SEQ ID NO: 1706 - DNA, 21 bp, Artificial Sequence
  Synthetic
  misc_feature (1)..(1): 5'-3 attached terminal deoxyabasic moiety
  misc_feature (21)..(21): 3'-3 attached terminal deoxyabasic moiety
  misc_feature (1)..(19): ribonucleotide unmodified or modified as described for this sequence
augaaccacguuaacagugtt

SEQ ID NO: 1707 - DNA, 21 bp, Artificial Sequence
  Synthetic
  misc_feature (20)..(20): Phosphorothioate 3'-Internucleotide Linkage
  misc_feature (1)..(19): ribonucleotide unmodified or modified as described for this sequence
  misc_feature (21)..(21): 3'-3 attached terminal glyceryl moiety
cacuguuaacgugguucautt

SEQ ID NO: 1708 - DNA, 21 bp, Artificial Sequence
  Synthetic
  misc_feature (1)..(1): 2'-O-methyl
  misc_feature (3)..(5): 2'-O-Methyl
  misc_feature (8)..(8): 2'-O-Methyl
  misc_feature (10)..(10): 2'-O-Methyl
  misc_feature (13)..(14): 2'-O-Methyl
  misc_feature (16)..(17): 2'-O-Methyl
  misc_feature (19)..(19): 2'-O-Methyl
  misc_feature (2)..(2): 2'-deoxy-2'-fluoro
  misc_feature (6)..(7): 2'-deoxy-2'-fluoro
  misc_feature (9)..(9): 2'-deoxy-2'-fluoro
  misc_feature (11)..(12): 2'-deoxy-2'-fluoro
  misc_feature (15)..(15): 2'-deoxy-2'-fluoro
  misc_feature (18)..(18): 2'-deoxy-2'-fluoro
  misc_feature (1)..(19): ribonucleotide unmodified or modified as described for this sequence
augaaccacguuaacagugtt

SEQ ID NO: 1709 - DNA, 21 bp, Artificial Sequence
  Synthetic
  misc_feature (2)..(2): 2'-O-Methyl
  misc_feature (5)..(5): 2'-O-Methyl
  misc_feature (8)..(9): 2'-O-Methyl
  misc_feature (11)..(11): 2'-O-Methyl
  misc_feature (13)..(14): 2'-O-Methyl
  misc_feature (18)..(18): 2'-O-Methyl
  misc_feature (1)..(1): 2'-deoxy-2'-fluoro
  misc_feature (3)..(4): 2'-deoxy-2'-fluoro
  misc_feature (6)..(7): 2'-deoxy-2'-fluoro
  misc_feature (10)..(10): 2'-deoxy-2'-fluoro
  misc_feature (12)..(12): 2'-deoxy-2'-fluoro
  misc_feature (15)..(17): 2'-deoxy-2'-fluoro
  misc_feature (19)..(19): 2'-deoxy-2'-fluoro
  misc_feature (1)..(19): ribonucleotide unmodified or modified as described for this sequence
  misc_feature (20)..(20): Phosphorothioate 3'-Internucleotide Linkage
  misc_feature (21)..(21): 3'-3 attached terminal glyceryl moiety
cacuguuaacgugguucautt

SEQ ID NO: 1710 - DNA, 21 bp, Artificial Sequence
  Synthetic
  misc_feature (2)..(2): 2'-O-Methyl or 2'-deoxy-2'-fluoro
  misc_feature (6)..(7): 2'-O-Methyl or 2'-deoxy-2'-fluoro
  misc_feature (9)..(9): 2'-O-Methyl or 2'-deoxy-2'-fluoro
  misc_feature (11)..(12): 2'-O-Methyl or 2'-deoxy-2'-fluoro
  misc_feature (15)..(15): 2'-O-Methyl or 2'-deoxy-2'-fluoro
  misc_feature (18)..(18): 2'-O-Methyl or 2'-deoxy-2'-fluoro
  misc_feature (1)..(1): 5'-3 attached terminal deoxyabasic moiety
  misc_feature (21)..(21): 3'-3 attached terminal deoxyabasic moiety
  misc_feature (1)..(19): ribonucleotide unmodified or modified as described for this sequence
augaaccacguuaacagugtt

SEQ ID NO: 1711 - DNA, 21 bp, Artificial Sequence
  Synthetic
  misc_feature (1)..(1): 2'-deoxy-2'-fluoro
  misc_feature (3)..(4): 2'-deoxy-2'-fluoro
  misc_feature (6)..(7): 2'-deoxy-2'-fluoro
  misc_feature (10)..(10): 2'-deoxy-2'-fluoro
  misc_feature (12)..(12): 2'-deoxy-2'-fluoro
  misc_feature (15)..(17): 2'-deoxy-2'-fluoro
  misc_feature (19)..(19): 2'-deoxy-2'-fluoro
  misc_feature (20)..(20): Phosphorothioate 3'-Internucleotide Linkage
  misc_feature (1)..(19): ribonucleotide unmodified or modified as described for this sequence
  misc_feature (21)..(21): 3'-3 attached terminal glyceryl moiety
cacuguuaacgugguuuautt

SEQ ID NO: 1712 - DNA, 21 bp, Artificial Sequence
  Synthetic
  misc_feature (1)..(1): 2'-deoxy
  misc_feature (3)..(5): 2'-deoxy
  misc_feature (8)..(8): 2'-deoxy
  misc_feature (10)..(10): 2'-deoxy
  misc_feature (13)..(14): 2'-deoxy
  misc_feature (16)..(17): 2'-deoxy
  misc_feature (19)..(19): 2'-deoxy
  misc_feature (2)..(2): 2'-deoxy-2'-fluoro
  misc_feature (6)..(7): 2'-deoxy-2'-fluoro
  misc_feature (9)..(9): 2'-deoxy-2'-fluoro
  misc_feature (11)..(12): 2'-deoxy-2'-fluoro
  misc_feature (15)..(15): 2'-deoxy-2'-fluoro
  misc_feature (18)..(18): 2'-deoxy-2'-fluoro
  misc_feature (1)..(1): 5'-3 attached terminal deoxyabasic moiety
  misc_feature (21)..(21): 3'-3 attached terminal deoxyabasic moiety
  misc_feature (1)..(19): ribonucleotide unmodified or modified as described for this sequence
augaaccacguuaacagugtt

SEQ ID NO: 1713 - DNA, 21 bp, Artificial Sequence
  Synthetic
  misc_feature (2)..(2): 2'-deoxy-2'-fluoro
  misc_feature (6)..(7): 2'-deoxy-2'-fluoro
  misc_feature (9)..(9): 2'-deoxy-2'-fluoro
  misc_feature (11)..(12): 2'-deoxy-2'-fluoro
  misc_feature (15)..(15): 2'-deoxy-2'-fluoro
  misc_feature (18)..(18): 2'-deoxy-2'-fluoro
  misc_feature (1)..(1): 5'-3 attached terminal deoxyabasic moiety
  misc_feature (21)..(21): 3'-3 attached terminal deoxyabasic moiety
  misc_feature (1)..(19): ribonucleotide unmodified or modified as described for this sequence
augaaccacguuaacagugtt

SEQ ID NO: 1714 - DNA, 21 bp, Artificial Sequence
  Synthetic
  misc_feature (2)..(2): 2'-deoxy
  misc_feature (5)..(5): 2'-deoxy
  misc_feature (8)..(9): 2'-deoxy
  misc_feature (11)..(11): 2'-deoxy
  misc_feature (13)..(14): 2'-deoxy
  misc_feature (18)..(18): 2'-deoxy
  misc_feature (1)..(1): 2'-deoxy-2'-fluoro
  misc_feature (3)..(4): 2'-deoxy-2'-fluoro
  misc_feature (6)..(7): 2'-deoxy-2'-fluoro
  misc_feature (10)..(10): 2'-deoxy-2'-fluoro
  misc_feature (12)..(12): 2'-deoxy-2'-fluoro
  misc_feature (15)..(17): 2'-deoxy-2'-fluoro
  misc_feature (19)..(19): 2'-deoxy-2'-fluoro
  misc_feature (20)..(20): Phosphorothioate 3'-Internucleotide Linkage
  misc_feature (1)..(19): ribonucleotide unmodified or modified as described for this sequence
  misc_feature (21)..(21): 3'-3 attached terminal glyceryl moiety
cacuguuaacgugguuuautt

SEQ ID NO: 1715 - RNA, 3254 nt, Homo sapiens
agaguugcacugaguguggcugaagcagcgaggcgggaguggaggugcgcggagucaggcagacagacagacacagccagccagccaggucggcaguauaguccgaacugcaaaucuuauuuucuuuucaccuucucucuaacugcccagagcuagcgccuguggcucccgggcuggugguucgggaguguccagagagccuugucuccagccggccccgggaggagagcccugcugcccaggcgcuguugacagcggcggaaagcagcgguaccccacgcgcccgccgggggacgucggcgagcggcugcagcagcaaagaacuuucccggcggggaggaccggagacaaguggcagagucccggagcgaacuuuugcaagccuuuccugcgucuuaggcuucuccacggcgguaaagaccagaaggcggcggagagccacgcaagagaagaaggacgugcgcucagcuucgcucgcaccgguuguugaacuugggcgagcgcgagccgcggcugccgggcgcccccucccccuagcagcggaggaggggacaagucgucggaguccgggcggccaagacccgccgccggccggccacugcaggguccgcacugauccgcuccgcggggagagccgcugcucugggaagugaguucgccugcggacuccgaggaaccgcugcgcccgaagagcgcucagugagugaccgcgacuuuucaaagccggguagcgcgcgcgagucgacaaguaagagugcgggaggcaucuuaauuaacccugcgcucccuggagcgagcuggugaggagggcgcagcggggacgacagccagcgggugcgugcgcucuuagagaaacuuucccugucaaaggcuccggggggcgcgggugucccccgcuugccagagcccuguugcggccccgaaacuugugcgcgcacgccaaacuaaccucacgugaagugacggacuguucuaugacugcaaagauggaaacgaccuucuaugacgaugcccucaacgccucguuccucccguccgagagcggaccuuauggcuacaguaaccccaagauccugaaacagagcaugacccugaaccuggccgacccaguggggagccugaagccgcaccuccgcgccaagaacucggaccuccucaccucgcccgacguggggcugcucaagcuggcgucgcccgagcuggagcgccugauaauccaguccagcaacgggcacaucaccaccacgccgacccccacccaguuccugugccccaagaacgugacagaugagcaggagggguucgccgagggcuucgugcgcgcccuggccgaacugcacagccagaacacgcugcccagcgucacgucggcggcgcagccggucaacggggcaggcaugguggcucccgcgguagccucgguggcagggggcagcggcagcggcggcuucagcgccagccugcacagcgagccgccggucuacgcaaaccucagcaacuucaacccaggcgcgcugagcagcggcggcggggcgcccuccuacggcgcggccggccuggccuuucccgcgcaaccccagcagcagcagcagccgccgcaccaccugccccagcagaugcccgugcagcacccgcggcugcaggcccugaaggaggagccucagacagugcccgagaugcccggcgagacaccgccccugucccccaucgacauggagucccaggagcggaucaaggcggagaggaagcgcaugaggaaccgcaucgcugccuccaagugccgaaaaaggaagcuggagagaaucgcccggcuggaggaaaaagugaaaaccuugaaagcucagaacucggagcuggcguccacggccaacaugcucagggaacagguggcacagcuuaaacagaaagucaugaaccacguuaacagugggugccaacucaugcuaacgcagcaguugcaaacauuuugaagagagaccgucgggggcugaggggcaacgaagaaaaaaaauaacacagagagacagacuugagaacuugacaaguugcgacggagagaaaaaagaaguguccgagaacuaaagccaaggguauccaaguuggacuggguucggucugacggcgcccccagugugcacgagugggaaggacuuggucgcgcccucccuuggcguggagccagggagcggccgccugcgggcugccccgcuuugcggacgggcuguccccgcgcgaacggaacguuggacuuucguuaacauugaccaagaacugcauggaccuaacauucgaucucauucaguauuaaaggggggagggggaggggguuacaaacugcaauagagacuguagauugcuucuguaguacuccuuaagaacacaaagcggggggaggguuggggaggggcggcaggagggagguuugugagagcgaggcugagccuacagaugaacucuuucuggccugcuuucguuaacuguguauguacauauauauauuuuuuaauuugauuaaagcugauuacugucaauaaacagcuucaugccuuuguaaguuauuucuuguuuguuuguuuggguauccugcccaguguuguuuguaaauaagagauuuggagcacucugaguuuaccauuuguaauaaaguauauaauuuuuuuauguuuuguuucugaaaauuccagaaaggauauuuaagaaaauacaauaaacuauuggaaaguacuccccuaaccucuuuucugcaucaucuguagauccuagucuaucuagguggaguugaaagaguuaagaaugcucgauaaaaucacucucagugcuucuuacuauuaagcaguaaaaacuguucucuauuagacuuagaaauaaauguaccugauguaccugaugcuaugucaggcuucauacuccacgcucccccagcguaucuauauggaauugcuuaccaaaggcuagugcgauguuucaggaggcuggaggaagggggguugcaguggagagggacagcccacugagaagucaaacauuucaaaguuuggauugcaucaaguggcaugugcugugaccauuuauaauguuagaaauuuuacaauaggugcuuauucucaaagcaggaauugguggcagauuuuacaaaagauguauccuuccaauuuggaaucuucucuuugacaauuccuagauaaaaagauggccuuugucuuaugaauauuuauaacagcauucugucacaauaaauguauucaaauaccaau

What we claim is:

1. A chemically modified nucleic acid molecule, wherein:
(a) the nucleic acid molecule comprises a sense strand and a separate antisense strand, each strand having one or more pyrimidine nucleotides and one or more purine nucleotides;
(b) each strand of the nucleic acid molecule is independently 18 to 27 nucleotides in length;
(c) an 18 to 27 nucleotide sequence of the antisense strand is complementary to a human c-Jun RNA sequence comprising SEQ ID NO:1715;
(d) an 18 to 27 nucleotide sequence of the sense strand is complementary to the antisense strand and comprises an 18 to 27 nucleotide sequence of the human RNA sequence; and
(e) 50 percent or more of the nucleotides in at least one strand comprise a 2′-sugar modification, wherein the 2′-sugar modification of any of the pyrimidine nucleotides differs from the 2′-sugar modification of any of the purine nucleotides.

2. The nucleic acid molecule of claim 1, wherein 50 percent or more of the nucleotides in each strand comprise a 2′-sugar modification.

3. The nucleic acid molecule of claim 1, wherein the 2′-sugar modification is selected from the group consisting of 2′-deoxy-2′-fluoro, 2′-O-methyl, and 2′-deoxy.

4. The nucleic acid of claim 3, wherein the 2′-deoxy-2′-fluoro sugar modification is a pyrimidine modification.

5. The nucleic acid of claim 3, wherein the 2′-deoxy sugar modification is a pyrimidine modification.

6. The nucleic acid of claim 3, wherein the 2′-O-methyl sugar modification is a pyrimidine modification.

7. The nucleic acid molecule of claim 4, wherein said pyrimidine modification is in the sense strand, the antisense strand, or both the sense strand and antisense strand.

8. The nucleic acid molecule of claim 6, wherein said pyrimidine modification is in the sense strand, the antisense strand, or both the sense strand and antisense strand.

9. The nucleic acid molecule of claim 3, wherein the 2′-deoxy sugar modification is a purine modification.

10. The nucleic acid molecule of claim 3, wherein the 2′-O-methyl sugar modification is a purine modification.

11. The nucleic acid molecule of claim 9, wherein the purine modification is in the sense strand.

12. The nucleic acid molecule of claim 10, wherein the purine modification is in the antisense strand.

13. The nucleic acid molecule of claim 1, wherein the nucleic acid molecule comprises ribonucleotides.

14. The nucleic acid molecule of claim 1, wherein the sense strand includes a terminal cap moiety at the 5′-end, the 3′-end, or both of the 5′- and 3′-ends.

15. The nucleic acid molecule of claim 14, wherein the terminal cap moiety is an inverted deoxy abasic moiety.

16. The nucleic acid molecule of claim 1, wherein said nucleic acid molecule includes one or more phosphorothioate internucleotide linkages.

17. The nucleic acid molecule of claim 16, wherein one of the phosphorothioate internucleotide linkages is at the 3′-end of the antisense strand.

18. The nucleic acid molecule of claim 1, wherein the 5′-end of the antisense strand includes a terminal phosphate group.

19. The nucleic acid molecule of claim 1, wherein the sense strand, the antisense strand, or both the sense strand and the antisense strand include a 3′-overhang.

20. A composition comprising the nucleic acid molecule of claim 1, in a pharmaceutically acceptable carrier or diluent.
